(19) United States
(12) Patent Application Publication
(10) Pub. No.: US 2023/0364219 A1
(43) Pub. Date: Nov. 16, 2023

(54) SARS COV-2 SPIKE PROTEIN CONSTRUCT

(71) Applicant: GlaxoSmithKline Biologicals SA, Rixensart (BE)

(72) Inventors: Dong YU, Rockville, MD (US); Giulietta MARUGGI, Rockville, MD (US); Jason W. WESTERBECK, Rockville, MD (US); Jeffrey B. ULMER, Rockville, MD (US); Jason P. LALIBERTE, Rockville, MD (US); Kate LUISI, Collegeville, PA (US); Lin QU, Collegeville, PA (US)

(73) Assignee: GlaxoSmithKline Biologicals SA, Rixensart (BE)

(21) Appl. No.: 17/918,676

(22) PCT Filed: Apr. 16, 2021
(86) PCT No.: PCT/IB2021/053161

§ 371 Date: Oct. 13, 2022

Related U.S. Application Data
(60) Provisional application No. 63/029,813, filed on May 26, 2020.
(60) Provisional application No. 63/010,763, filed on Apr. 16, 2020.

(51) Int. Cl. A61K 39/215; A61P 37/04

(52) U.S. Cl. CPC A61K 39/215; A61P 37/04; A61K 2039/55566

(57) ABSTRACT

Compounds useful as components of immunogenic compositions for the induction of an immunogenic response in a subject against infection, methods for their use in treatment, and processes for their manufacture are provided herein. The compounds comprise a nucleic acid construct comprising a sequence which encodes an antigen, in particular a Coronavirus antigen.

[0001] This application claims priority to U.S. Provisional Pat. Application 63/010763, filed Apr. 16, 2020 and U.S. Provisional Pat. Application 63/029813, filed May 26, 2020, each of which is hereby incorporated by reference in its entirety.

### SEQUENCE LISTING

[0002] The instant application contains a Sequence Listing which has been submitted electronically in ASCII format and is hereby incorporated by reference in its entirety. Said ASCII copy, created on Mar. 31, 2021, is named VU66912_SL.txt and is 1,216,512 bytes in size.

### FIELD OF THE INVENTION

[0003] This invention is in the field of treating and preventing infections such as viral infections. In particular, the present invention relates to the use of Coronaviral antigens for treating and preventing Coronavirus infections.

### BACKGROUND TO THE INVENTION

[0004] The sequences of the Coronavirus spike protein (S) antigen for various Coronavirus strains are known. A prefusion stabilized Coronavirus S antigen was published in WO2018081318. Coronavirus sequences associated with COVID19 were published in 2020, see GenBank accession number MN908947. A prefusion stabilized Coronavirus S antigen ectodomain was published in Wrapp et al. (2020) “Cryo-EM structure of the 2019-nCoV spike in the prefusion conformation.” Science, 367:1260-1263.

[0005] Given the concerning disease burden and the potential for rapid dissemination, there is an urgent need for the development of components for use in a Coronavirus vaccine.

[0006] In the context of a vaccine, and in particular a Coronavirus vaccine, based on the use of a nucleic acid construct to express an antigen in target cells, there is a need to increase to increase expression and presentation of the antigen to the immune system.

### SUMMARY OF THE INVENTION

[0007] The present inventors provide constructs in which the expression and secretion or cell-surface expression of an antigen is enhanced. In some embodiments, the construct encodes a viral antigen, in particular a coronavirus antigen, wherein the expression and secretion or cell-surface expression is enhanced. Such constructs are useful as components of immunogenic compositions for the induction of an immune response in a subject. In some embodiments, such constructs are useful as components of immunogenic compositions for the induction of an immune response against Coronaviral infection. Methods for their use in treatment, and processes for their manufacture are also provided.

[0008] In one aspect, the invention provides a construct comprising a nucleic acid sequence encoding an antigen, wherein the antigen comprises a heterologous signal sequence.

[0009] In one aspect, the invention provides a construct comprising a nucleic acid sequence encoding an antigen, wherein the antigen comprises a heterologous signal sequence selected from a Gaussian Luciferase signal sequence as shown in SEQ ID NO:2, a human CD5 signal sequence as shown in SEQ ID NO:3, a human CD33 signal sequence as shown in SEQ ID NO:4, a human IL2 signal sequence as shown in SEQ ID NO:5, a human IgE signal sequence as shown in SEQ ID NO:6, a human Light Chain Kappa signal sequence as shown in SEQ ID NO:7, a JEV short signal sequence as shown in SEQ ID NO:8, a JEV long signal sequence as shown in SEQ ID NO:9, a Mouse Light Chain Kappa signal sequence as shown in SEQ ID NO:10, a SSP signal sequence as shown in SEQ ID NO:11, a Gaussian Luciferase (AKP) signal sequence as shown in SEQ ID NO:12, and variants thereof.

[0010] In one aspect, the invention provides a construct comprising a nucleic acid sequence encoding an antigen, suitably a coronavirus antigen, wherein the antigen comprises a heterologous signal sequence, a mutation with respect to the wild-type sequence which affects retention of the antigen in the endoplasmic reticulum, or a combination thereof.

[0011] In one aspect of the construct, the invention provides a self-replicating RNA comprising the construct of the invention.

[0012] In one aspect, the invention provides a DNA molecule encoding the self-replicating RNA of the invention.

[0013] In one aspect, the invention provides a composition comprising an immunologically effective amount of one or more of the constructs, self-replicating RNA or DNA of the invention.

[0014] In one aspect, the invention provides a process for producing an RNA-based vaccine comprising a step of transcribing the DNA molecule of the invention to produce a self-replicating RNA comprising a coding region for the coronavirus S protein.

[0015] In one aspect, the invention provides a composition produced by the process of the invention.

[0016] In one aspect, the invention provides a method of inducing an immune response against a Coronavirus infection in a subject in need thereof, which comprises administering to said subject an immunologically effective amount of the construct, the self-replicating RNA, the DNA molecule, or the composition of the invention.

[0017] In one aspect, the invention provides the construct, the self-replicating RNA, the DNA molecule, or the composition of the invention, for use in therapy.

[0018] In one aspect, the invention provides the construct, the RNA, the DNA molecule, or the composition of the invention, for use in preventing or treating a coronavirus infection in a subject.

[0019] In one aspect, the invention provides the construct, the self-replicating RNA, the DNA molecule, or the composition of the invention, for use in preventing or treating a SARS CoV-2 infection in a subject.

[0020] In one aspect, the invention provides the use of the construct, the self-replicating RNA, the DNA molecule, or the composition of the invention for inducing an immune response to a Coronavirus infection in a subject.

[0021] In one aspect, the invention provides the use of the construct, the self-replicating RNA, the DNA molecule, or the composition of the invention in the manufacture of a medicament inducing an immune response against a Coronavirus infection in a subject.

[0022] In one aspect, the invention provides the use of the construct, the self-replicating RNA, the DNA molecule, or the composition of the invention for inducing an immune response to a SARS CoV-2 infection in a subject.

[0023] In one aspect, the invention provides the use of the construct, the self-replicating RNA, the DNA molecule, or the composition of the invention in the manufacture of a medicament inducing an immune response against a SARS CoV-2 infection in a subject.

[0024] A. The present inventors also provide constructs encoding a coronavirus antigen. In some embodiments, a construct comprising a nucleic acid sequence selected from (a) a nucleic acid sequence encoding a polypeptide comprising the amino acid sequence of SEQ ID NO:49 and SEQ ID NO:26; (b) a nucleic acid sequence comprising the DNA sequence of SEQ ID NO:97 and SEQ ID NO:74; (c) a nucleic acid sequence comprising the RNA sequence of SEQ ID NO:145 and SEQ ID NO:122; and (d) variants or fragments of (a)-(c) are provided. In some embodiments, a self-replicating RNA molecule comprising a construct encoding a polypeptide comprising a Coronavirus spike (S) antigen, or an immunogenic variant or fragment are provided.

[0025] In some embodiments, a composition comprising an immunologically effective amount of one or more of the constructs or the self-replicating RNA molecules described beginning in section A above is provided.

[0026] In some embodiments, a method is provided for inducing an immune response against a Coronavirus infection in a subject in need thereof, which comprises administering to said subject an immunologically effective amount of a composition comprising one or more of the constructs or self-replicating RNA molecules as described beginning in section A above.

[0027] In some embodiments, a process is provided for producing an RNA-based vaccine comprising a step of transcribing a DNA molecule encoding a self-replicating RNA molecule as described beginning in section A above.

[0028] In some embodiments, a composition produced by the process of described beginning in section A above is provided.

[0029] In some embodiments, a use of the constructs, self-replicating RNA molecules, or compositions described beginning in section A above for inducing an immune response against a Coronavirus infection in a subject is provided.

[0030] In some embodiments, a use of the constructs, self-replicating RNA molecules, or compositions described beginning in section A above in the manufacture of a medicament for inducing an immune response against a Coronavirus infection in a subject is provided.

[0031] In some embodiments, a use of the constructs, self-replicating RNA molecules, or compositions described beginning in section A above for inducing an immune response against a SARS CoV-2 infection in a subject is provided.

[0032] In some embodiments, a use of the constructs, self-replicating RNA molecules, or compositions described beginning in section A above in the manufacture of a medicament for inducing an immune response against a SARS CoV-2 infection in a subject is provided.

### DESCRIPTION OF DRAWINGS/FIGURES

[0033] FIG. 1 Illustrates the vectors and sequences used to generate three SARS CoV-2 The self-amplifying mRNA (SAM) replicons. FIG. 1 discloses “GSAS” as SEQ ID NO: 190.

[0034] FIG. 2A illustrates pDNA in situ of Spike_ECTO-2P SAM replicon with furin cleavage site mutation and 2X proline mutation, pJW18; FIG. 2B illustrates pDNA in situ of Spike_WT SAM replicon (pJW20). FIG. 2C illustrates pDNA in situ of Spike_FL-2P SAM (pJW19).

[0035] FIG. 3 illustrates pDNA SAM CoV-2 Spike vectors digested with Apa1 and Pmel restriction enzymes to verify size of the spike sequence insert (3.8 Kb). Vector bands were compared to NEB 1 Kb extend DNA ladder (Ladder) and to the pDNA SAM source vector (pJL209).

[0036] FIG. 4. illustrates pDNA SAM CoV-2 Spike vectors digested with BspQI restriction enzyme prior to IVT.

[0037] FIG. 5 illustrates SAM RNA gel analysis.

[0038] FIG. 6A illustrates percent of cells containing dsRNA after electroporation as determined by J2 mouse monoclonal antibody staining. FIG. 6B illustrates geometric mean fluorescence intensity (MFI) of J2 positive cells (correlate of dsRNA amount). FIG. 6C illustrates percent of cells containing SARS CoV-2 spike protein as detected by a mouse monoclonal antibody to the S2 fragment of the spike protein from Genetex (GTX632604). FIG. 6D illustrates MFI of spike positive cells (correlate of amount of spike protein present).

[0039] FIG. 7A illustrates western blot analysis of SARS CoV-2 Spike SAM RNA replicons from BHK cells: 5% lysate from a 1 µg RNA electroporation into 1 million BHK cells. FIG. 7B illustrates western blot analysis of SARS CoV-2 Spike SAM RNA replicons from BHK cells: 5% lysate from a 1 µg RNA electroporation into 1 million BHK cells.

[0040] FIG. 8A illustrates total protein evaluation and comparison in fixed cells between percent positive spike cells and percent positive mScarlet signal from a control SAM replicon. Surface evaluation in live cells of the percent surface spike (FIG. 8B), and percent surface hACE2 binding cells (normalized by subtracting BFA+ value for each sample) (FIG. 8C). MFI values of spike or hACE2 for spike total protein (FIG. 8D), spike surface protein (FIG. 8E) and hACE2 bound to live cells (FIG. 8F).

[0041] FIG. 9A, FIG. 9B illustrates percent of cells containing dsRNA after electroporation as determined by J2 mouse monoclonal antibody staining for SAM GFP control and spike replicons. FIG. 9C depicts geometric mean fluorescence intensity (MFI) of J2 positive cells (correlate of dsRNA amount). FIG. 9D, FIG. 9E illustrate percent of cells containing mScarlet or SARS CoV-2 spike protein as detected by a mouse monoclonal antibody to the S2 fragment of the spike protein from Genetex (GTX632604). FIG. 9F, FIG. 9G depict surface evaluation in live cells of the percent surface spike, and percent surface hACE2 binding cells, respectively.

[0042] FIG. 10A, FIG. 10B illustrates 5% lysate from a 1 µg RNA electroporation into 1 million muscle cells were evaluated with and without PNGase (N-glycosidase treatment). FIG. 10C illustrates 25 µl of 10X concentrated supernatant was run per well of an 4-12% SDS-PAGE gel, and transferred to a nitrocellulose membrane.

[0043] FIG. 11A illustrates an EC50 curve of Spike_ECTO-2P SAM (JW18) (LPN) and Spike_FL-2P SAM(JW19) (LNP). FIG. 11B depicts an EC50 bar graph SAM-CoV-2 RV39 Potency protein expression assay. FIG. 11C depicts result images from HCI 10x objective: JW18: Spike_ECTO-2P SAM (LNP); JW19: Spike_FL-2P SAM (LNP).

[0044] FIG. 12 illustrates SEQ ID NO:49 depicts the polypeptide sequence of the full-length S protein, including the PP and GSAS (SEQ ID NO:190) substitutions (underlined, bold) but lacking the foldon, HRV3C protease cleavage, TwinStrepTab, and 8XHisTag (SEQ ID NO:231).

[0045] FIG. 13 illustrates SEQ ID NO:26 depicts the polypeptide sequence of the ectodomain of the prefusion stabilized S protein, including the foldon (italics, underlined), the PP and GSAS (SEQ ID NO:190) substitutions (underlined, bold), but lacking HRV3C protease cleavage, TwinStrepTab, and 8XHisTag (SEQ ID NO:231).

[0046] FIG. 14 illustrates details of the study design for the SARSCoV-2 vaccine using the SAM platform in the female BALB/c mouse.

[0047] FIG. 15 illustrates Luminex titers of study samples in AU with horizontal bars representing the Geometric Mean Titer (GMT) and vertical bars representing the 95% Confidence Intervals (CI). CNE: CoV-2 Spike_FL-2P SAM (CNE); LNP: CoV-2 Spike_FL-2P SAM (LNP); ecto: CoV-2 Spike _ECTO-2P SAM (LNP).

[0048] FIG. 16A illustrates Geometric Mean Ratio of CNE vs. LNP delivery formulations, SAM at 1.5 µg. FIG. 16B illustrates Geometric Mean Ratio of CNE vs. LNP delivery formulations, SAM at 0.15 µg.

[0049] FIG. 17A illustrates Geometric Mean Ratio of Spike_FL-2P SAM vs Spike_ECTO-2P SAM formulated with LNP, SAM at 1.5 µg. FIG. 17B illustrates Geometric Mean Ratio of Spike_FL-2P SAM vs Spike_ECTO-2P SAM formulated with LNP, SAM at 0.15 µg.

[0050] FIG. 18 illustrates neutralization antibody titers of the study samples in NT50 with horizontal bars representing the Geometric Mean Titer (GMT) and vertical bars representing the 95% Confidence Intervals (CI). CNE: CoV-2 Spike_FL-2P SAM (CNE); LNP:CoV-2 Spike _FL-2P SAM (LNP); ecto: CoV-2 Spike _ECTO-2P SAM (LNP).

[0051] FIG. 19A illustrates Geometric Mean Ratio of CNE vs. LNP delivery formulations, SAM at 1.5 µg. FIG. 19B illustrates Geometric Mean Ratio of CNE vs. LNP delivery formulations, SAM at 0.15 µg.

[0052] FIG. 20 illustrates Geometric Mean Ratio of Spike_FL-2P SAM vs Spike_ECTO-2P SAM formulated at 0.15 µg with LNP.

[0053] FIG. 21A illustrates frequency of IgD-IgM- cells among the CD3-CD19+ B-cells. FIG. 22B illustrates Frequency of CD95+GL7+ cells among the CD3-CD19+IgD-IgM- B cells. Each bar indicates magnitude of the response with the SEM shown in error bars. * indicates a statistical difference with P<0.05.

[0054] FIG. 22A illustrates frequency of Spike-specific cells among the CD3-CD19+IgD-IgM- B cells. FIG. 22B illustrates frequency of CD95+CD38+ among the Spike-specific CD3-CD19+IgD-IgM- B-cells. FIG. 22C illustrates frequency of CD95+GL7+ among the Spike-specific CD3-CD19+IgD-IgM- B-cells. Each bar indicates magnitude of the response with the SEM shown in error bars. * indicates a statistical difference with P<0.05.

[0055] FIG. 23A illustrates frequency of IgD-IgM- cells among the CD3-CD19+ B-cells. FIG. 23B illustrates frequency of CD95+GL7+ cells among the CD3-CD19+IgD-IgM- B-cells. Each bar indicates magnitude of the response with the SEM shown in error bars. * indicates a statistical difference with P<0.05.

[0056] FIG. 24A illustrates frequency of the Spike-specific cells among CD3-CD19+ IgD-IgM- B-cells. FIG. 24B illustrates frequency of CD95+GL7+ cells among Spike-specific CD3-CD19+IgD-IgM- B cells. Each bar indicates magnitude of the response with the SEM shown in error bars. * indicates a statistical difference with P<0.05.

[0057] FIG. 25A illustrates frequency of CD73+ cells among the Spike-specific CD3-CD19+IgD-IgM- B-cells. FIG. 25B illustrates frequency of CD80+ cells among the Spike-specific CD3-CD19+IgD-IgM- B-cells. FIG. 25C illustrates frequency of CD273+ cells among the Spike-specific CD3-CD19+IgD-IgM- B-cells. Each bar indicates magnitude of the response with the SEM shown in error bars. Mann-Whitney test was used for a side-by-side statistical comparison between the AS03-adjuvantd and the SAM LNP vaccine groups. ** indicates a statistical difference with P<0.01.

[0058] FIG. 26A illustrates the mean and SEM of total spike-specific CD4+ T-cell responses from 5 individual mice per group. FIG. 26B illustrates the mean and SEM of total spike-specific CD8+ T-cell responses from 5 individual mice per group. [*] Denotes a significant difference in total CD8+ T-cell response between the SAM LNP spike FL vs. SAM CNE spike FL vaccine groups at comparable doses. [†] Denotes a significant difference in Total T-cell responses between the spike protein/AS03 group and all SAM vaccine groups, apart from the SAM (CNE) 15 µg and 1.5 µg doses and the SAM (LNP) 1.5 µg dose for CD4 T-cells.

[0059] FIG. 27 illustrates mean of various spike-specific polyfunctional CD4+ (top panel) and CD8+ (bottom panel) T-cell populations for select vaccine groups. The dots within each bar represent individual mice responses.

[0060] FIG. 28A illustrates SARS-CoV-2 Spike-specific individual cytokine CD107a CD4+ T-cell responses in splenocytes at 2wp2. FIG. 28B illustrates SARS-CoV-2 Spike-specific individual cytokine IFN-γ CD4+ T-cell responses in splenocytes at 2wp2. FIG. 28C illustrates SARS-CoV-2 Spike-specific individual cytokine IL-4/IL-13 CD4+ T-cell responses in splenocytes at 2wp2. FIG. 28D illustrates SARS-CoV-2 Spike-specific individual cytokine IL-2 CD4+ T-cell responses in splenocytes at 2wp2. FIG. 28E illustrates SARS-CoV-2 Spike-specific individual cytokine TNF-α CD4+ T-cell responses in splenocytes at 2wp2. FIG. 28F illustrates SARS-CoV-2 Spike-specific individual cytokine IL-17F CD4+ T-cell responses in splenocytes at 2wp2.

[0061] FIG. 29A illustrates SARS-CoV-2 Spike-specific individual cytokine CD107a CD8+ T-cell responses in splenocytes at 2wp2. FIG. 29B illustrates SARS-CoV-2 Spike-specific individual cytokine IFN-γ CD8+ T-cell responses in splenocytes at 2wp2. FIG. 29C illustrates SARS-CoV-2 Spike-specific individual cytokine IL-2 CD8+ T-cell responses in splenocytes at 2wp2. FIG. 29D illustrates SARS-CoV-2 Spike-specific individual cytokine TNF-α CD8+ T-cell responses in splenocytes at 2wp2.

[0062] FIG. 30 illustrates the mean and SEM of total SAM nsP-specific CD4+ (top panel) and CD8+ (bottom panel) T-cell responses from 5 individual mice per group as measured using stimulation of splenocytes with a combination of nsP-1, nsP-2, nsP-3, and nsP-4 peptide pools. [*] Denotes a significantly different total T-cell response between comparator groups.

[0063] FIG. 31 illustrates frequencies of Tfh cells in spleen represented as mean ± SEM. Significance was determined by one-way ANOVA using GraphPad Prism 8.0. **:P<0.01; ***:P<0.001.

[0064] FIG. 32 - SAM-SARS CoV2 construct. The self-amplifying mRNA (SAM) shown herein is based on the RNA backbone of a VEE TC-83 replicon. This SAM comprises from 5′ to 3′ a non-coding sequence; a sequence encoding the viral nonstructural proteins 1-4 (nsP1-4); a subgenomic promoter; an insertion site comprising a construct encoding a CoV2 S antigen; a non-coding sequence and a poly(A) tail. A DNA encoding an empty SAM is shown in SEQ ID NO:170; the corresponding empty SAM is shown in SEQ ID NO: 171. The insertion site is immediately after nucleotide 7561.

[0065] FIG. 33A - FIG. 33C - SARS-CoV2 Spike protein optimization (adapted from Wrapp et al., 2020). FIG. 33A) Native full-length SARS-CoV2 Spike (S) protein; FIG. 33B) SAM - Full-length SARS-CoV2 Spike (S) protein (2XP,GSAS) (pJW19) FIG. 33B discloses “GSAS” as SEQ ID NO: 190. FIG. 33C) SAM - Ecto domain SARS-CoV2 Spike (S) protein (2XP,GSAS,T4 Trimer motif) (pJW18). FIG. 33C discloses “GSAS” as SEQ ID NO: 190. NTD: N-terminal domain; RBD: Receptor binding domain; FP: Fusion peptide; HR1: Heptad repeat 1; HR2: Heptad repeat 2; CH: Central helix; TM: Transmembrane; CT: C-terminal; CD: Connector domain; S2′: S2′ protease cleavage site; S1/S2: Cleavage site between S1 and S2 (furin-like).

[0066] FIG. 34 - Mutation of the S protein signal sequence in full length (FL) S protein (pJW19). FIG. 34 discloses SEQ ID NOS 190 and 232-254, respectively, in order of appearance.

[0067] FIG. 35 - Mutation of the S protein signal sequence in Ecto domain S protein (pJW18). FIG. 35 discloses SEQ ID NOS 190 and 232-254, respectively, in order of appearance.

[0068] FIG. 36 - Mutation of the ER retention signal in full length (FL) S protein (pJW19). FIG. 36 discloses SEQ ID NOS 190 and 255-257, respectively in order of appearance.

[0069] FIG. 37: SEQ ID NO:49 depicts the polypeptide sequence of the full-length S protein, including the PP and GSAS (SEQ ID NO: 190) substitutions (underlined, bold) of Wrapp et al. (2020), but lacking the foldon, HRV3C protease cleavage, TwinStrepTab, and 8XHisTag (SEQ ID NO: 231).

[0070] FIG. 38: SEQ ID NO:26 depicts the polypeptide sequence of the ectodomain of the prefusion stabilized S protein, including the foldon (italics, underlined), the PP and GSAS (SEQ ID NO:190) substitutions (underlined, bold) of Wrapp et al. (2020), but lacking HRV3C protease cleavage, TwinStrepTab, and 8XHisTag (SEQ ID NO: 231).

[0071] FIG. 39: DNA sequence of the plasmid that expresses the RNA sequence for the SAM-SARS-CoV2 Spike constructs. Upper case: SAM backbone; Lower case: non-SAM sequence; underlined: 5′ UTR of SAM; bold underlined: 3′ UTR of SAM; grey shade: antigen insertion site. FIG. 39 discloses SEQ ID NO: 170.

[0072] FIG. 40 illustrates % of antigen positive BHK cells (100 ng RNA electroporation). SARS-CoV-2 spike full length SAM mutants (heterologous signal sequences) compared to WT, i.e., pJW19 encoding the native spike protein signal sequence.

[0073] FIG. 41 illustrates % of antigen positive BHK cells (100 ng RNA electroporation). SARS-CoV-2 spike full length SAM mutants (heterologous signal sequences).

[0074] FIG. 42 illustrates MFI of spike positive BHK cells (100 ng RNA electroporation). SARS-CoV-2 spike full length SAM mutants (heterologous signal sequences) compared to WT, i.e., pJW19 encoding the native spike protein signal sequence.

[0075] FIG. 43 illustrates % of antigen positive BHK cells (300 ng RNA electroporation). SARS-CoV-2 spike full length SAM mutants (heterologous signal sequences) compared to WT, i.e., pJW19 encoding the native spike protein signal sequence.

[0076] FIG. 44 illustrates % of antigen positive BHK cells (2 µg RNA electroporation). SARS-CoV-2 spike full length SAM mutants (heterologous signal sequences) compared to WT, i.e., pJW19 encoding the native spike protein signal sequence.

[0077] FIG. 45 illustrates % of antigen positive BHK cells (100 ng RNA electroporation). SARS-CoV-2 spike Ecto SAM mutants (heterologous signal sequences) compared to WT, i.e., pJW18 encoding the native spike protein signal sequence.

[0078] FIG. 46 illustrates concentration of spike protein in concentrated supernatant. SARS-CoV-2 spike Ecto SAM mutants (heterologous signal sequences) compared to WT, i.e., pJW18 encoding the native spike protein signal sequence.

[0079] FIG. 47 illustrates concentration of spike protein in cell lysate. SARS-CoV-2 spike Ecto SAM mutants (heterologous signal sequences) compared to WT, i.e., pJW18 encoding the native spike protein signal sequence.

[0080] FIG. 48 illustrates concentration of spike protein in cell lysate and supernatant. SARS-CoV-2 spike Ecto SAM mutants (heterologous signal sequences) compared to WT, i.e., pJW18 encoding the native spike protein signal sequence.

[0081] FIG. 49 illustrates supernatant-to-cell ratio of spike protein. SARS-CoV-2 spike Ecto SAM mutants (heterologous signal sequences) compared to WT, i.e., pJW18 encoding the native spike protein signal sequence.

[0082] FIG. 50 illustrates supernatant-to-cell ratio of spike protein normalized to actin and wild type. SARS-CoV-2 spike Ecto SAM mutants (heterologous signal sequences) compared to WT, i.e., pJW18 encoding the native spike protein signal sequence.

### DETAILED DESCRIPTION OF THE INVENTION

### Antigens; Variants; Fragments; and Constructs

[0083] The present inventors provide constructs, RNA molecules, and self-replicating RNA molecules useful as components of immunogenic compositions for the induction of an immune response in a subject, nucleic acids useful for their expression, methods for their use in treatment, and processes for their manufacture. In some embodiments, the present inventors provide constructs and self-replicating RNA molecules useful as components of immunogenic compositions for the induction of an immune response in a subject against Coronaviral infection, nucleic acids useful for their expression, methods for their use in treatment, and processes for their manufacture. By construct is intended a nucleic acid that encodes polypeptide sequences described herein, and may comprise DNA, RNA, or non-naturally occurring nucleic acid monomers. The nucleic acid components of constructs are described more fully in the Nucleic Acids section herein.

[0084] In some embodiments, the constructs, RNA molecules, and and self-replicating RNA molecules disclosed herein encode wild-type polypeptide sequences of a Coronavirus, or a variant, or a fragment thereof. The constructs and self-replicating RNA molecules may further encode a polypeptide sequence heterologous to the polypeptide sequences of a Coronavirus. In some embodiments, the constructs and self-replicating RNA molecules encode wild-type polypeptide sequences of a SARS CoV-2, or a variant, or a fragment thereof. Unless indicated otherwise, descriptions of the wild-type Coronavirus antigens are made by reference to those encoded by the genome of the 2019-nCoV virus (GenBank: MN908947).

[0085] A “variant” of a polypeptide sequence includes amino acid sequences having one or more amino acid substitutions and/or deletions when compared to the reference sequence. In some embodiments, a variant includes the relevant polypeptide from a NL63-CoV, 229E-CoV, OC43-CoV, SARS-CoV, MERS-CoV, HKUI-CoV, WIVI-CoV, mouse hepatitis virus (MHV), or HKU9-CoV. In some embodiments, the variant may comprise an amino acid sequence which is at least 70%, at least 75%, at least 80%, at least 85%, at least 90%, at least 95%, at least 96%, at least 97%, at least 98%, or at least 99%) identical to a full-length wild-type polypeptide. Alternatively, or in addition, a fragment of a polypeptide may comprise an immunogenic fragment (i.e. an epitope-containing fragment) of the full-length polypeptide which may comprise a contiguous amino acid sequence of at least 8, at least 9, at least 10, at least 11, at least 12, at least 13, at least 14, at least 15, at least 16, at least 17, at least 18, at least, or more amino acids which is identical to a contiguous amino acid sequence of the full-length polypeptide. As used herein, the term “antigen” refers to a molecule containing one or more epitopes (e.g., linear, conformational or both) that will stimulate a host’s immune system to make a humoral and/or cellular antigen-specific immunological response (i.e. an immune response which specifically recognizes a naturally occurring polypeptide). An “epitope” is that portion of an antigen that determines its immunological specificity.

[0086] T- and B-cell epitopes can be identified empirically (e.g. using PEPSCAN or similar methods). See the following reference: Geysen et al. (1984) PNAS USA 81 :3998-4002; Carter (1994) Methods Mol Biol 36:207-23. They can be predicted (e.g. using the Jameson- Wolf antigenic index (see Jameson et al. (1988) CABIOS 4(1): 181-186), matrix-based approaches (see Raddrizzani & Hammer (2000) Brief Bioinform 1(2): 179-89), TEPITOPE (see De Lalla et al. (1999) J. Immunol. 163: 1725-29), neural networks (see Brusic et al. (1998) Bioinformatics 14(2): 121-30), OptiMer & EpiMer (see Meister et al. (1995) Vaccine 13(6):581-91; see Roberts et al. (1996) AIDS Res Hum Retroviruses 12(7):593-610), ADEPT (see Maksyutov & Zagrebelnaya (1993) Comput Appl Biosci 9(3):291-7), Tsites (see Feller & de la Cruz (1991) Nature 349(6311):720-1), hydrophilicity (see Hopp (1993) Peptide Research 6:183-190), antigenic index (see Welling et al. (1985) FEBS Lett. 188:215-218) or the methods disclosed in reference Davenport et al. (1995) Immunogenetics 42:392-297, etc.).

[0087] In some embodiments, constructs and self-replicating RNA molecules are provided herein that encode a Coronavirus S antigen. By “Coronavirus S antigen” is intended the amino acid sequence, or a nucleotide sequence encoding the amino acid sequence, of a wild-type Coronavirus S protein, variant, or fragment thereof. Unless indicated otherwise, descriptions of the wild-type S antigen are made by reference to residues 1-1273 encoded by the genome of 2019-nCoV S (GenBank: MN908947), as depicted in the SEQ ID NO:11 (polypeptide).

[0088] In some embodiments, the constructs and self-replicating RNA molecules encode a prefusion stabilized Coronavirus S protein variant as described in WO2018081318. In some embodiments, the constructs and self-replicating RNA molecules encode a recombinant coronavirus S antigen comprising one or more proline substitution(s) that stabilize the S protein trimer in the prefusion conformation. Such as one or more (such as two) proline substitutions at or near the boundary between a Heptad Repeat 1 (HR1) and a central helix of the protomers of the coronavirus S ectodomain trimer was found to be surprisingly effective for stabilization of coronavirus S protein trimers in the prefusion conformation. In some embodiments, the constructs and self-replicating RNA molecules encode a recombinant alphacoronavirus or betacoronavirus S antigen comprising one or two proline substitutions at or near a junction between a heptad repeat 1 (HR1) and a central helix that stabilizes the S trimer in a prefusion conformation. The one or two proline substitutions can comprise two consecutive proline substitutions (a “double proline substitution”). FIG. 12, FIG. 13, and FIG. 38 disclose the amino acid sequence of two such prefusion stabilized Coronavirus S protein variants. The sequence identifier numbers for each are set forth in the Sequences section and Sequence Listing herein. See SEQ ID NOS:49 and SEQ ID NO:26. The S antigen can also comprise a mutation in the furin cleavage site to help stabilize the prefusion form of the protein. Without wishing to be bound by theory, It is also considered that mutating the furin cleavage site will avoid the protein being processed into two subunits inside the cell and enable the entire protein to be expressed on the cell surface or be secreted. In some embodiments, the ecto domain protein has the entire C-terminus (including the transmembrane domain) deleted and replaced by a trimerization domain such as the T4 fibritin trimerization (foldon) motif, in order to promote the formation of trimeric complexes and stabilize the prefusion form of the protein.

[0089] Thus, in embodiments where a Coronavirus S protein (antigen) is a variant of a prefusion stabilized S polypeptide, the variant may be a stabilized NL63-CoV, 229E-CoV, OC43-CoV, SARS-CoV, MERS-CoV, HKUI-CoV, WIVI-CoV, mouse hepatitis virus (MHV), or HKU9-CoV S protein variant as described in WO2018081318, or a stabilized SARS CoV-2 S protein variant as described in Wrapp (2020) “Cryo-EM structure of the 2019-nCoV spike in the prefusion conformation.” Science, 367:1260-1263.

[0090] In some embodiments, a construct encodes a stabilized SARS CoV-2 S protein variant. In some embodiments, a construct may encode a polypeptide having a sequence as set forth in SEQ ID NO:49 or SEQ ID NO:26. In some embodiments, a construct may encode a polypeptide having is at least 70%, at least 75%, at least 80%, at least 85%, at least 90%, at least 95%, at least 96%, at least 97%, at least 98%, or at least 99% identical to a sequence set forth in SEQ ID NOS:49 or SEQ ID NO:26. In some embodiments, a construct may encode a polypeptide which comprises a fragment of a full-length sequence set forth in SEQ ID NOS:49 or SEQ ID NO:26, wherein the fragment comprises a contiguous stretch of the amino acid sequence of the full-length sequence up to 1, 2, 3, 4, 5, 6, 7, 8, 9, or 10 amino acids shorter than full-length sequence. In some embodiments, a fragment or variant described herein can be immunogenic.

[0091] In some embodiments, the construct comprises a DNA nucleic acid sequence set forth in SEQ ID NO:97 or SEQ ID NO:74. In some embodiments, the construct comprises a nucleic acid sequence which is at least 70%, at least 75%, at least 80%, at least 85%, at least 90%, at least 95%, at least 96%, at least 97%, at least 98%, or at least 99% identical to a sequence set forth in SEQ ID NO:97 or SEQ ID NO:74. In such embodiments, the construct comprises a nucleic acid sequence which comprises a fragment of a full-length sequence set forth in SEQ ID NO:97 or SEQ ID NO:74 wherein the fragment comprises a contiguous stretch of the nucleic acid sequence of the full-length sequence up to 1, 2, 3, 4, 5, 6, 7, 8, 9, 10, 15, 20, 25, or 30 nucleic acids shorter than full-length sequence.

[0092] In some embodiments, the construct comprises a RNA nucleic acid sequence comprising a sequence set forth in SEQ ID NO:145 or SEQ ID NO:122. In such embodiments, the construct comprises a nucleic acid sequence which is at least 70%, at least 75%, at least 80%, at least 85%, at least 90%, at least 95%, at least 96%, at least 97%, at least 98%, or at least 99% identical to a sequence set forth in SEQ ID NO:145 and SEQ ID NO:122. In such embodiments, the construct comprises a nucleic acid sequence which comprises a fragment of a full-length sequence selected from the group consisting of SEQ ID NO:145 and SEQ ID NO:122 wherein the fragment comprises a contiguous stretch of the nucleic acid sequence of the full-length sequence up to 1, 2, 3, 4, 5, 6, 7, 8, 9, 10, 15, 20, 25, or 30 nucleic acids shorter than full-length sequence.

### Signal Sequence

[0093] The present invention aims in particular at enhancing the expression and secretion or cell-surface expression of an antigen expressed from an intracellular construct. The inventors have in particular designed constructs in which the native antigen signal sequence is replaced by a heterologous signal sequence. The inventors have also designed constructs in which the endoplasmic reticulum (ER) retention signal is mutated or deleted.

[0094] In one aspect, the invention provides a construct comprising a nucleic acid sequence encoding an antigen, wherein the antigen comprises a heterologous signal sequence. In one aspect, the invention provides a construct comprising a nucleic acid sequence encoding an antigen, wherein the antigen comprises a heterologous signal sequence, a mutation with respect to the wild-type sequence which affects retention of the antigen in the endoplasmic reticulum, or a combination thereof.

[0095] In one embodiment, the antigen is a coronavirus antigen. The coronavirus antigen may be from SARS CoV-2, NL63-CoV, 229E-CoV, OC43-CoV, SARS-CoV, MERS-CoV, HKUI-CoV, WIVI-CoV, mouse hepatitis virus (MHV), HKU9-CoV S, or a variant thereof. Suitably, the coronavirus antigen is a coronavirus S protein. The coronavirus S protein may be a S protein from SARS CoV-2, NL63-CoV, 229E-CoV, OC43-CoV, SARS-CoV, MERS-CoV, HKUI-CoV, WIVI-CoV, mouse hepatitis virus (MHV), HKU9-CoV S, or a variant thereof. In a preferred embodiment, the coronavirus S protein is a SARS CoV-2 S protein. In some embodiments, a variant disclosed herein is immunogenic.

[0096] In some embodiments, the antigen comprises a heterologous signal sequence. As used herein, a “signal sequence” refers to a short (usually less than 60 amino acids, for example, 3 to 60 amino acids) amino acid sequence present on precursor proteins (typically at the N terminus), and which is typically absent from the mature protein. The signal sequence is typically rich in hydrophobic amino acids. The signal peptide directs the transport and/or secretion of the translated protein through the membrane. Signal sequences may also be called targeting signals, transit peptides, localization signals, or signal peptides. A “heterologous signal sequence” is a signal sequence which originates from a different species than the antigen. In some embodiments, a heterologous signal sequence comprises a positive charge at its N terminus.

[0097] Suitably, the heterologous signal sequence has a sequence selected from:
[0098] a) a Gaussian Luciferase signal sequence as shown in SEQ ID NO:2,
[0099] b) a human CD5 signal sequence as shown in SEQ ID NO:3,
[0100] c) a human CD33 signal sequence as shown in SEQ ID NO:4,
[0101] d) a human IL2 signal sequence as shown in SEQ ID NO:5,
[0102] e) a human IgE signal sequence as shown in SEQ ID NO:6,
[0103] f) a human Light Chain Kappa signal sequence as shown in SEQ ID NO:7,
[0104] g) a JEV short signal sequence as shown in SEQ ID NO:8,
[0105] h) a JEV long signal sequence as shown in SEQ ID NO:9,
[0106] i) a Mouse Light Chain Kappa signal sequence as shown in SEQ ID NO:10,
[0107] j) a SSP signal sequence as shown in SEQ ID NO:11,
[0108] k) a Gaussian Luciferase (AKP) signal sequence as shown in SEQ ID NO: 12, and
[0109] l) a variant of any one of sequences (a)-(k) having 1, 2, 3, 4 or 5 amino acid residue deletions, insertions or substitutions.

[0110] In some embodiments, the heterologous signal sequence has a sequence selected from:
[0111] a) a Gaussian Luciferase signal sequence as shown in SEQ ID NO:2,
[0112] b) a human Light Chain Kappa signal sequence as shown in SEQ ID NO:7,
[0113] c) a Gaussian Luciferase (AKP) signal sequence as shown in SEQ ID NO: 12, and
[0114] d) a variant of any one of sequences (a)-(k) having 1, 2, 3, 4 or 5 amino acid residue deletions, insertions or substitutions.

[0115] In some embodiments, the heterologous signal sequence comprises a sequence which is at least 70%, at least 75%, at least 80%, at least 85%, at least 90%, at least 95%, at least 96%, at least 97%, at least 98%, or at least 99% identical to a sequence selected from: SEQ ID NO:2, SEQ ID NO:3, SEQ ID NO:4, SEQ ID NO:5, SEQ ID NO:6, SEQ ID NO:7, SEQ ID NO:8, SEQ ID NO:9, SEQ ID NO:10, SEQ ID NO:11, or SEQ ID NO: 12. In some embodiments, the heterologous signal sequence comprises a sequence which is at least 70%, at least 75%, at least 80%, at least 85%, at least 90%, at least 95%, at least 96%, at least 97%, at least 98%, or at least 99% identical to a sequence selected from: SEQ ID NO:2, SEQ ID NO:7, or SEQ ID NO:12. In embodiments where the antigen itself has a naturally occurring signal sequence, the heterologous signal sequence can replace the naturally occurring signal sequence. In one embodiment where the antigen has a naturally occurring signal sequence, the heterologous signal sequence replaces residues 1-16 of the antigen. In one embodiment where the antigen has a naturally occurring signal sequence, the heterologous signal sequence replaces residues 1-18 of the antigen.

[0116] In one embodiment where the antigen is a SARS CoV-2 S protein, the heterologous signal sequence replaces residues 1-16 of the SARS CoV-2 S protein as shown in SEQ ID NO:1, or corresponding residues in another SARS CoV-2 S protein sequence. Suitably, residues 1-16 of the SARS CoV-2 S protein as shown in SEQ ID NO:1, or corresponding residues in another SARS CoV-2 S protein sequence are replaced by a sequence selected from:
[0117] a) a Gaussian Luciferase signal sequence as shown in SEQ ID NO:2,
[0118] b) a human CD5 signal sequence as shown in SEQ ID NO:3,
[0119] c) a human CD33 signal sequence as shown in SEQ ID NO:4,
[0120] d) a human IL2 signal sequence as shown in SEQ ID NO:5,
[0121] e) a human IgE signal sequence as shown in SEQ ID NO:6,
[0122] f) a human Light Chain Kappa signal sequence as shown in SEQ ID NO:7,
[0123] g) a JEV short signal sequence as shown in SEQ ID NO:8,
[0124] h) a JEV long signal sequence as shown in SEQ ID NO:9,
[0125] i) a Mouse Light Chain Kappa signal sequence as shown in SEQ ID NO:10,
[0126] j) a SSP signal sequence as shown in SEQ ID NO:11,
[0127] k) a Gaussian Luciferase (AKP) signal sequence as shown in SEQ ID NO: 12, and
[0128] l) a variant of any one of sequences (a)-(k) having 1, 2, 3, 4 or 5 amino acid residue deletions, insertions or substitutions.

[0129] In one embodiment where the antigen is a SARS CoV-2 S protein, the heterologous signal sequence replaces residues 1-18 of the SARS CoV-2 S protein as shown in SEQ ID NO:1, or corresponding residues in another SARS CoV-2 S protein sequence. Suitably, residues 1-18 of the SARS CoV-2 S protein as shown in SEQ ID NO:1, or corresponding residues in another SARS CoV-2 S protein sequence are replaced by a sequence selected from:
[0130] a) a Gaussian Luciferase signal sequence as shown in SEQ ID NO:2,
[0131] b) a human CD5 signal sequence as shown in SEQ ID NO:3,
[0132] c) a human CD33 signal sequence as shown in SEQ ID NO:4,
[0133] d) a human IL2 signal sequence as shown in SEQ ID NO:5,
[0134] e) a human IgE signal sequence as shown in SEQ ID NO:6,
[0135] f) a human Light Chain Kappa signal sequence as shown in SEQ ID NO:7,
[0136] g) a JEV short signal sequence as shown in SEQ ID NO:8,
[0137] h) a JEV long signal sequence as shown in SEQ ID NO:9,
[0138] i) a Mouse Light Chain Kappa signal sequence as shown in SEQ ID NO:10,
[0139] j) a SSP signal sequence as shown in SEQ ID NO:11,
[0140] k) a Gaussian Luciferase (AKP) signal sequence as shown in SEQ ID NO: 12, and
[0141] l) a variant of any one of sequences (a)-(k) having 1, 2, 3, 4 or 5 amino acid residue deletions, insertions or substitutions.

[0142] In one embodiment, the antigen comprises a mutation with respect to the wild-type sequence which affects retention of the antigen in the endoplasmic reticulum (ER). In one embodiment, one or more point mutations are made to the ER retention signal. In one embodiment, the ER retention signal is deleted. In one embodiment, the entire C-terminal domain comprising the ER retention signal is deleted.

[0143] In one embodiment where the antigen is a SARS CoV-2 S protein, the mutation with respect to the wild-type sequence which affects retention of the antigen in the endoplasmic reticulum is selected from:
[0144] a) the substitution of residues K1269 and H1271 as shown in SEQ ID NO:1 to alanine residues, or corresponding substitutions in another SARS Cov-2 S protein sequence, and
[0145] b) the deletion of residues 1261-1273 of SEQ ID NO:1, or of corresponding residues in another SARS Cov-2 S protein sequence.

[0146] In one embodiment where the antigen is a coronavirus S protein, the coronavirus S protein comprises one or mutations with respect to the wild-type sequence which stabilize the prefusion form of the coronavirus S protein. In some embodiments, the construct encodes a prefusion stabilized coronavirus S protein variant as described in WO2018081318. In some embodiments, the construct encodes a recombinant coronavirus S antigen comprising one or more proline substitution(s) that stabilize the S protein trimer in the prefusion conformation. In some embodiments, the construct encodes a recombinant coronavirus S antigen comprising one or more (such as two) proline substitutions at or near the boundary between a Heptad Repeat 1 (HR1) and a central helix that stabilizes the S trimer in a prefusion conformation. In some embodiments, the construct encodes a recombinant alphacoronavirus or betacoronavirus S antigen comprising one or two proline substitutions at or near a junction between a heptad repeat 1 (HR1) and a central helix that stabilizes the S trimer in a prefusion conformation. The one or two proline substitutions can comprise two consecutive proline substitutions (a “double proline substitution”). The S antigen can also comprise a mutation in the furin cleavage site to help stabilize the prefusion form of the protein. In some embodiments, the ecto domain protein has the entire C-terminus (including the transmembrane domain) deleted and replaced by a trimerization domain such as the T4 fibritin trimerization (foldon) motif, in order to promote the formation of trimeric complexes and stabilize the prefusion form of the protein.

[0147] In one embodiment where the coronavirus S protein is a SARS CoV-2 S protein, the one or more mutations comprise the substitutions of residues ⁹⁸⁸KV⁹⁸⁷ as shown in SEQ ID NO:1 to ⁹⁸⁶PP⁹⁸⁷, and/or the substitution of residues ⁶⁸²RRAR⁶⁸⁵ (SEQ ID NO:188) as shown in SEQ ID NO:1 to ⁶⁸²GSAS⁶⁸⁵ (SEQ ID NO:190) or corresponding mutations in another SARS Cov-2 S protein sequence.

[0148] Suitably, the native transmembrane and cytosolic domains of the coronavirus S protein are replaced by a heterologous trimerization domain. In one embodiment, the native transmembrane and cytosolic domains of the coronavirus S protein are replaced by a trimerization domain, for example a C-terminal T4 fibritin trimerization (foldon) motif.

[0149] In one embodiment where the antigen is a SARS CoV-2 S protein, residues 1208-1273 of the sequence shown in SEQ ID NO: 1, or corresponding residues in another SARS Cov-2 S protein sequence, are replaced by a C-terminal T4 fibritin trimerization (foldon) motif having the sequence shown in SEQ ID NO:24.

[0150] In one embodiment where the antigen is a SARS CoV-2 S protein, the S protein has an amino acid sequence selected from SEQ ID NOs:27-73, or a variant which is at least 70%, at least 75%, at least 80%, at least 85%, at least 90%, at least 95%, at least 96%, at least 97%, at least 98%, or at least 99% identical thereto.

[0151] In one embodiment where the antigen is a SARS CoV-2 S protein, the S protein is encoded by a DNA sequence having a sequence selected from SEQ ID NOs:75-121, or a variant which is at least 70%, at least 75%, at least 80%, at least 85%, at least 90%, at least 95%, at least 96%, at least 97%, at least 98%, or at least 99% identical thereto.

[0152] In one embodiment where the antigen is a SARS CoV-2 S protein, the S protein is encoded by an RNA sequence having a sequence selected from SEQ ID NOs:123-169, or a variant which is at least 70%, at least 75%, at least 80%, at least 85%, at least 90%, at least 95%, at least 96%, at least 97%, at least 98%, or at least 99% identical thereto.

[0153] In one aspect, the invention provides a nucleic acid sequence comprising a construct as described above, and further comprising additional sequence elements. For instance, the nucleic acid may comprise sequence elements useful for the functioning of a mRNA, a self-replicating RNA, a plasmid, or the like.

[0154] In one embodiment of the invention, the nucleic acid comprises a construct according to the invention and additional sequence elements useful for the functioning of a mRNA, and the nucleic acid is an RNA molecule. In one embodiment, the RNA is a self-replicating RNA. Suitably, the self-replicating RNA comprises or consists essentially of a VEE TC-83 replicon encoding from 5′ to 3′ viral nonstructural proteins 1-4 (nsP1-4), followed by a subgenomic promoter, and a construct (or insert) encoding the antigen. In one embodiment, the VEE TC-83 replicon has the DNA sequence shown in FIG. 8 and SEQ ID NO:170, and the construct encoding the antigen is inserted immediately after residue 7561. In one embodiment, the VEE TC-83 replicon has the RNA sequence shown in SEQ ID NO:171, and the construct encoding the antigen is inserted immediately after residue 7561. In one embodiment, the self-replicating RNA comprises from 5′ to 3′ a sequence having SEQ ID NO:172, a construct encoding (i) a signal sequence selected from the group consisting of SEQ ID NOS:258-268 and (ii) and antigen, and a sequence having SEQ ID NO: 173. In one embodiment, the self-replicating RNA comprises from 5′ to 3′ a sequence having SEQ ID NO:172, a construct encoding (i) a signal sequence selected from the group consisting of SEQ ID NO:258, SEQ ID NO:263, and SEQ ID NO:268 and (ii) and antigen, and a sequence having SEQ ID NO:173. In one embodiment, the self-replicating RNA comprises from 5′ to 3′ a sequence having SEQ ID NO:172, a construct having a sequence selected from the group consisting of SEQ ID NOS:122-169, and a sequence having SEQ ID NO: 173. In one embodiment, the antigen is a coronavirus antigen, preferably a SARS-CoV2 S protein.

[0155] The invention also provides a DNA molecule encoding the RNA molecule of the invention. In some embodiments, the DNA molecule comprises SEQ ID NO:174 and/or SEQ ID NO:175. In some embodiments, a DNA encoding a SAM may comprise three regions from 5′ to 3′, the first region comprising the sequence up to the insertion point (for instance nucleotides 1-7561 of SEQ ID NO:170, herein SEQ ID NO:174), the second region comprising a construct (for example comprising an immunogenic antigen disclosed herein), and the third region comprising the sequence after the insertion point (for instance nucleotides 7562-10000 of SEQ ID NO:170, herein SEQ ID NO:175).

[0156] In some embodiments, the invention provides a construct encoding a polypeptide having a sequence selected from the group consisting of SEQ ID NOS:26-73. In some embodiments, the construct encodes a polypeptide which is at least 70%, at least 75%, at least 80%, at least 85%, at least 90%, at least 95%, at least 96%, at least 97%, at least 98%, or at least 99% identical to a sequence selected from the group consisting of SEQ ID NOS:26-73. In some embodiments, the construct encodes a polypeptide which comprises a fragment of a full-length sequence selected from the group consisting of SEQ ID NOS:26-73, wherein the fragment comprises a contiguous stretch of the amino acid sequence of the full-length sequence up to 1, 2, 3, 4, 5, 6, 7, 8, 9, or 10 amino acids shorter than full-length sequence.

[0157] In some embodiments, the construct comprises a DNA nucleic acid sequence selected from the group consisting of SEQ ID NOS:74-121. In some embodiments, the construct comprises a nucleic acid sequence which is at least 70%, at least 75%, at least 80%, at least 85%, at least 90%, at least 95%, at least 96%, at least 97%, at least 98%, or at least 99% identical to a sequence selected from the group consisting of SEQ ID NOS:74-121. In some embodiments, the construct comprises a nucleic acid sequence which comprises a fragment of a full-length sequence selected from the group consisting of SEQ ID NOS:74-121 wherein the fragment comprises a contiguous stretch of the nucleic acid sequence of the full-length sequence up to 1, 2, 3, 4, 5, 6, 7, 8, 9, 10, 15, 20, 25, or 30 nucleic acids shorter than full-length sequence.

[0158] In some embodiments, the construct comprises a RNA nucleic acid sequence selected from the group consisting of SEQ ID NOS:122-169. In some embodiments, the construct comprises a nucleic acid sequence which is at least 70%, at least 75%, at least 80%, at least 85%, at least 90%, at least 95%, at least 96%, at least 97%, at least 98%, or at least 99% identical to a sequence selected from the group consisting of SEQ ID NOS:122-169. In some embodiments, the construct comprises a nucleic acid sequence which comprises a fragment of a full-length sequence selected from the group consisting of SEQ ID NOS:122-169 wherein the fragment comprises a contiguous stretch of the nucleic acid sequence of the full-length sequence up to 1, 2, 3, 4, 5, 6, 7, 8, 9, 10, 15, 20, 25, or 30 nucleic acids shorter than full-length sequence.

### Nucleic Acids

[0159] The present inventors disclose herein nucleic acid comprising a sequence which encodes a Coronavirus S antigen. Nucleic acid as disclosed herein can take various forms (e.g. single-stranded, double-stranded, vectors etc.). Nucleic acids may be circular or branched, but will generally be linear.

[0160] The nucleic acids used herein are preferably provided in purified or substantially purified form i.e. substantially free from other nucleic acids (e.g. free from naturally-occurring nucleic acids), particularly from other Coronavirus or host cell nucleic acids, generally being at least about 50% pure (by weight), and usually at least about 90% pure.

[0161] Nucleic acids may be prepared in many ways e.g. by chemical synthesis (e.g. phosphoramidite synthesis of DNA) in whole or in part, by digesting longer nucleic acids using nucleases (e.g. restriction enzymes), by joining shorter nucleic acids or nucleotides (e.g. using ligases or polymerases), from genomic or cDNA libraries, etc.

[0162] The term “nucleic acid” in general means a polymeric form of nucleotides of any length, which contain deoxyribonucleotides, ribonucleotides, and/or their analogs. It includes DNA, RNA, DNA/RNA hybrids. It also includes DNA or RNA analogs, such as those containing modified backbones (e.g. peptide nucleic acids (PNAs) or phosphorothioates) or modified bases. Thus the nucleic acid of the disclosure includes mRNA, DNA, cDNA, recombinant nucleic acids, branched nucleic acids, plasmids, vectors, etc. Where the nucleic acid takes the form of RNA, it may or may not have a 5′ cap.

[0163] The nucleic acids herein comprise a sequence which encodes at least one Coronavirus S antigen. Typically, the nucleic acids of the invention will be in recombinant form, i. e. a form which does not occur in nature. For example, the nucleic acid may comprise one or more heterologous nucleic acid sequences (e.g. a sequence encoding another antigen and/or a control sequence such as a promoter or an internal ribosome entry site) in addition to the sequence encoding at least one Coronavirus S antigen. The nucleic acid may be part of a vector i.e. part of a nucleic acid designed for transduction/transfection of one or more cell types. Vectors may be, for example, “expression vectors” which are designed for expression of a nucleotide sequence in a host cell, or “viral vectors” which are designed to result in the production of a recombinant virus or virus-like particle.

[0164] Alternatively, or in addition, the sequence or chemical structure of the nucleic acid may be modified compared to a naturally-occurring sequence which encodes a Coronavirus S antigen. The sequence of the nucleic acid molecule may be modified, e.g. to increase the efficacy of expression or replication of the nucleic acid, or to provide additional stability or resistance to degradation.

[0165] The nucleic acid encoding the polypeptides described above may be codon optimized. In some embodiments, the nucleic acid encoding the polypeptides described above may be codon optimized for expression in human cells. By “codon optimized” is intended modification with respect to codon usage may increase translation efficacy and half- life of the nucleic acid. A poly A tail (e.g., of about 30 adenosine residues or more) may be attached to the 3′ end of the RNA to increase its half-life. The 5′ end of the RNA may be capped with a modified ribonucleotide with the structure m7G (5′) ppp (5′) N (cap 0 structure) or a derivative thereof, which can be incorporated during RNA synthesis or can be enzymatically engineered after RNA transcription (e.g., by using Vaccinia Virus Capping Enzyme (VCE) consisting of mRNA triphosphatase, guanylyl- transferase and guanine-7-methytransferase, which catalyzes the construction of N7-monomethylated cap 0 structures). Cap 0 structure plays an important role in maintaining the stability and translational efficacy of the RNA molecule. The 5′ cap of the RNA molecule may be further modified by a 2 ‘-O-Methyltransferase which results in the generation of a cap 1 structure (m7Gppp [m2 ‘-O] N), which may further increases translation efficacy.

[0166] The nucleic acids may comprise one or more nucleotide analogs or modified nucleotides. As used herein, “nucleotide analog” or “modified nucleotide” refers to a nucleotide that contains one or more chemical modifications (e.g., substitutions) in or on the nitrogenous base of the nucleoside (e.g., cytosine (C), thymine (T) or uracil (U)), adenine (A) or guanine (G)). A nucleotide analog can contain further chemical modifications in or on the sugar moiety of the nucleoside (e.g., ribose, deoxyribose, modified ribose, modified deoxyribose, six-membered sugar analog, or open-chain sugar analog), or the phosphate. The preparation of nucleotides and modified nucleotides and nucleosides are well-known in the art, see the following references: U.S. Pat. No. 4373071, 4458066, 4500707, 4668777, 4973679, 5047524, 5132418, 5153319, 5262530, 5700642. Many modified nucleosides and modified nucleotides are commercially available.

[0167] Modified nucleobases which can be incorporated into modified nucleosides and nucleotides and be present in the RNA molecules include: m5C (5-methylcytidine), m5U (5-methyluridine), m6A (N6-methyladenosine), s2U (2-thiouridine), Um (2′-0-methyluridine), mlA (1-methyladenosine); m2A (2-methyladenosine); Am (2-1-O-methyladenosine); ms2m6A (2-methylthio-N6-methyladenosine); i6A (N6-isopentenyladenosine); ms2i6A (2-methylthio-N6isopentenyladenosine); io6A (N6-(cis-hydroxyisopentenyl)adenosine); ms2io6A (2-methylthio-N6-(cis-hydroxyisopentenyl) adenosine); g6A (N6-glycinylcarbamoyladenosine); t6A (N6-threonyl carbamoyladenosine); ms2t6A (2-methylthio-N6-threonyl carbamoyladenosine); m6t6A (N6-methyl-N6-threonylcarbamoyladenosine); hn6A(N6-hydroxynorvalylcarbamoyl adenosine); ms2hn6A (2-methylthio-N6-hydroxynorvalyl carbamoyladenosine); Ar(p) (2′-0-ribosyladenosine (phosphate)); I (inosine); mil (1-methylinosine); m′lm (I,2′-0-dimethylinosine); m3C (3-methylcytidine); Cm (2T-0-methylcytidine); s2C (2-thiocytidine); ac4C (N4-acetylcytidine); £5C (5-fonnylcytidine); m5Cm (5,2-O-dimethylcytidine); ac4Cm (N4acetyl2TOmethylcytidine); k2C (lysidine); mlG (1-methylguanosine); m2G (N2-methylguanosine); m7G (7-methylguanosine); Gm (2′-0-methylguanosine); m22G (N2,N2-dimethylguanosine); m2Gm (N2,2′-0-dimethylguanosine); m22Gm (N2,N2,2′-0-trimethylguanosine); Gr(p) (2′-0-ribosylguanosine (phosphate)); yW (wybutosine); o2yW (peroxywybutosine); OHyW (hydroxywybutosine); OHyW* (undermodified hydroxywybutosine); imG (wyosine); mimG (methylguanosine); Q (queuosine); oQ (epoxyqueuosine); galQ (galtactosyl-queuosine); manQ (mannosyl-queuosine); preQo (7-cyano-7-deazaguanosine); preQi (7-aminomethyl-7-deazaguanosine); G* (archaeosine); D (dihydrouridine); m5Um (5,2′-0-dimethyluridine); s4U (4-thiouridine); m5s2U (5-methyl-2-thiouridine); s2Um (2-thio-2′-0-methyluridine); acp3U (3-(3-amino-3-carboxypropyl)uridine); ho5U (5-hydroxyuridine); mo5U (5-methoxyuridine); cmo5U (uridine 5-oxyacetic acid); mcmo5U (uridine 5-oxyacetic acid methyl ester); chm5U (5-(carboxyhydroxymethyl)uridine)); mchm5U (5-(carboxyhydroxymethyl)uridine methyl ester); mcm5U (5-methoxycarbonyl methyluridine); mcm5Um (S-methoxycarbonylmethyl-2-O-methyluridine); mcm5s2U (5-methoxycarbonylmethyl-2-thiouridine); nm5s2U (5-aminomethyl-2-thiouridine); mnm5U (5-methylaminomethyluridine); mnm5s2U (5-methylaminomethyl-2-thiouridine); mnm5se2U (5-methylaminomethyl-2-selenouridine); ncm5U (5-carbamoylmethyl uridine); ncm5Um (5-carbamoylmethyl-2′-0-methyluridine); cmnm5U (5-carboxymethylaminomethyluridine); cnmm5Um (5-carboxymethy 1 aminomethyl-2-L-Omethyl uridine); cmnm5s2U (5-carboxymethylaminomethyl-2-thiouridine); m62A (N6,N6-dimethyladenosine); Tm (2′-0-methylinosine); m4C (N4-methylcytidine); m4Cm (N4,2-0-dimethylcytidine); hm5C (5-hydroxymethylcytidine); m3U (3-methyluridine); cm5U (5-carboxymethyluridine); m6Am (N6,T-0-dimethyladenosine); rn62Am (N6,N6,0-2-trimethyladenosine); m2′7G (N2,7-dimethylguanosine); m2′2′7G (N2,N2,7-trimethylguanosine); m3Um (3,2T-0-dimethyluridine); m5D (5-methyldihydrouridine); £5Cm (5-formyl-2′-0-methylcytidine); mlGm (I, 2′-0-dimethylguanosine); m′Am (1, 2-O-dimethyl adenosine) irinomethyluridine); tm5s2U (S-taurinomethyl-2-thiouridine)); iniG-14 (4-demethyl guanosine); imG2 (isoguanosine); ac6A (N6-acetyladenosine), hypoxanthine, inosine, 8-oxo-adenine, 7-substituted derivatives thereof, dihydrouracil, pseudouracil, 2-thiouracil, 4-thiouracil, 5-aminouracil, 5-(Ci-Ce)-alkyluracil, 5-methyluracil, 5-(C2-C6)-alkenyluracil, 5-(C2-Ce)-alkynyluracil, 5-(hydroxymethyl)uracil, 5-chlorouracil, 5-fluorouracil, 5-bromouracil, 5-hydroxycytosine, 5-(Ci-C6 )-alkylcytosine, 5-methylcytosine, 5-(C2-C6)-alkenylcytosine, 5-(C2-C6)-alkynylcytosine, 5-chlorocytosine, 5-fluorocytosine, 5-bromocytosine, N2-dimethylguanine, 7-deazaguanine, 8-azaguanine, 7-deaza-7-substituted guanine, 7-deaza-7-(C2-C6)alkynylguanine, 7-deaza-8-substituted guanine, 8-hydroxyguanine, 6-thioguanine, 8-oxoguanine, 2-aminopurine, 2-amino-6-chloropurine, 2,4-diaminopurine, 2,6-diaminopurine, 8-azapurine, substituted 7-deazapurine, 7-deaza-7-substituted purine, 7-deaza-8-substituted purine, hydrogen (abasic residue), m5C, m5U, m6A, s2U, W, or 2′-0-methyl-U. Many of these modified nucleobases and their corresponding ribonucleosides are available from commercial suppliers.

### Nucleic Acid-Based Vaccines

[0168] The present inventors disclose compositions comprising a nucleic acid sequence which encodes a polypeptide antigen, variant or fragment thereof, i.e., a construct as described elsewhere herein. The present inventors disclose compositions comprising a nucleic acid sequence which encodes a polypeptide comprising a Coronavirus antigen, variant or fragment thereof, i.e., a construct as described elsewhere herein. Such compositions may be a nucleic acid-based vaccine. A further composition comprising a nucleic acid sequence which encodes one or more additional Coronavirus antigens may also be provided as a nucleic acid-based vaccine. In some embodiments, a composition comprises a nucleic acid sequence encoding a Coronavirus S antigen from a first Coronavirus strain and an additional nucleic acid sequence encoding an additional Coronavirus S antigen from one or more other strains of Coronavirus. In some embodiments, a composition comprises a nucleic acid sequence encoding a Coronavirus S antigen and an additional Coronavirus antigen. Alternatively, an additional non-Coronavirus antigen may be encoded.

[0169] The nucleic acid may, for example, be RNA (i. e. an RNA-based vaccine) or DNA (i. e. a DNA-based vaccine, such as a plasmid DNA vaccine). In certain embodiments, the nucleic acid-based vaccine is an RNA-based vaccine. In certain embodiments, the RNA-based vaccine comprises a self-replicating RNA molecule. The self-replicating RNA molecule may be an alphavirus-derived RNA replicon.

[0170] Self-replicating RNA molecules are well known in the art and can be produced by using replication elements derived from, e.g., alphaviruses, and substituting the structural viral proteins with a nucleotide sequence encoding a protein of interest. A self-replicating RNA molecule is typically a +-strand molecule which can be directly translated after delivery to a cell, and this translation provides a RNA-dependent RNA polymerase which then produces both antisense and sense transcripts from the delivered RNA. Thus the delivered RNA leads to the production of multiple daughter RNAs. These daughter RNAs, as well as collinear subgenomic transcripts, may be translated themselves to provide in situ expression of an encoded antigen (i.e. a Coronavirus prM-F antigen), or may be transcribed to provide further transcripts with the same sense as the delivered RNA which are translated to provide in situ expression of the antigen. The overall result of this sequence of transcriptions is a huge amplification in the number of the introduced replicon RNAs and so the encoded antigen becomes a major polypeptide product of the cells.

[0171] One suitable system for achieving self-replication in this manner is to use an alphavirus-based replicon. These replicons are +-stranded RNAs which lead to translation of a replicase (or replicase-transcriptase) after delivery to a cell. The replicase is translated as a polyprotein which auto-cleaves to provide a replication complex which creates genomic-strand copies of the +-strand delivered RNA. These - -strand transcripts can themselves be transcribed to give further copies of the +-stranded parent RNA and also to give a subgenomic transcript which encodes the antigen. Translation of the subgenomic transcript thus leads to in situ expression of the antigen by the infected cell. Suitable alphavirus replicons can use a replicase from a Sindbis virus, a Semliki forest virus, an eastern equine encephalitis virus, a Venezuelan equine encephalitis virus, etc. Mutant or wild-type virus sequences can be used e.g. the attenuated TC83 mutant of VEEV has been used in replicons, see the following reference: WO2005/113782.

[0172] In certain embodiments, the self-replicating RNA molecule described herein encodes (i) a RNA-dependent RNA polymerase which can transcribe RNA from the self-replicating RNA molecule and (ii) a Coronavirus S antigen. The polymerase can be an alphavirus replicase e.g. comprising one or more of alphavirus proteins nsPI, nsP2, nsP3 and nsP4.

[0173] Whereas natural alphavirus genomes encode structural virion proteins in addition to the non-structural replicase polyprotein, in certain embodiments, the self-replicating RNA molecules do not encode alphavirus structural proteins. Thus, the self-replicating RNA can lead to the production of genomic RNA copies of itself in a cell, but not to the production of RNA-containing virions. The inability to produce these virions means that, unlike a wild-type alphavirus, the self-replicating RNA molecule cannot perpetuate itself in infectious form. The alphavirus structural proteins which are necessary for perpetuation in wild- type viruses are absent from self-replicating RNAs of the present disclosure and their place is taken by gene(s) encoding the immunogen of interest, such that the subgenomic transcript encodes the immunogen rather than the structural alphavirus virion proteins.

[0174] Thus a self-replicating RNA molecule useful with the invention may have two open reading frames. The first (5′) open reading frame encodes a replicase; the second (3′) open reading frame encodes an antigen. In some embodiments the RNA may have additional (e.g. downstream) open reading frames e.g. to encode further antigens or to encode accessory polypeptides.

[0175] A DNA encoding an empty SAM is shown in FIG. 8 and SEQ ID NO:170; the corresponding empty SAM is shown in SEQ ID NO:171. A construct would be inserted immediately after nucleotide 7561. Thus, a SAM may comprise three regions from 5′ to 3′, the first region comprising the sequence up to the insertion point (for instance nucleotides 1-7561 of SEQ ID NO:171, herein SEQ ID NO:172), the second region comprising a construct, and the third region comprising the sequence after the insertion point (for instance nucleotides 7562-7747 of SEQ ID NO:171, herein SEQ ID NO:173). Thus, a DNA encoding a SAM may comprise three regions from 5′ to 3′, the first region comprising the sequence up to the insertion point (for instance nucleotides 1-7561 of SEQ ID NO:170, herein SEQ ID NO:174), the second region comprising a construct, and the third region comprising the sequence after the insertion point (for instance nucleotides 7562-10000 of SEQ ID NO:170, herein SEQ ID NO: 175).

[0176] In certain embodiments, the self-replicating RNA molecule disclosed herein has a 5′ cap (e.g. a 7-methylguanosine). This cap can enhance in vivo translation of the RNA. In some embodiments the 5′ sequence of the self-replicating RNA molecule must be selected to ensure compatibility with the encoded replicase.

[0177] A self-replicating RNA molecule may have a 3′ poly-A tail. It may also include a poly- A polymerase recognition sequence (e.g. AAUAAA) near its 3′ end.

[0178] Self-replicating RNA molecules can have various lengths, but they are typically 5000-25000 nucleotides long. Self-replicating RNA molecules will typically be single-stranded. Single-stranded RNAs can generally initiate an adjuvant effect by binding to TLR7, TLR8, RNA helicases and/or PKR. RNA delivered in double-stranded form (dsRNA) can bind to TLR3, and this receptor can also be triggered by dsRNA which is formed either during replication of a single-stranded RNA or within the secondary structure of a single-stranded RNA.

[0179] The self-replicating RNA can conveniently be prepared by in vitro transcription (IVT). IVT can use a (cDNA) template created and propagated in plasmid form in bacteria, or created synthetically (for example by gene synthesis and/or polymerase chain-reaction (PCR) engineering methods). For instance, a DNA-dependent RNA polymerase (such as the bacteriophage T7, T3 or SP6 RNA polymerases) can be used to transcribe the self-replicating RNA from a DNA template. Appropriate capping and poly-A addition reactions can be used as required (although the replicon’s poly-A is usually encoded within the DNA template). These RNA polymerases can have stringent requirements for the transcribed 5′ nucleotide(s) and in some embodiments these requirements must be matched with the requirements of the encoded replicase, to ensure that the IVT-transcribed RNA can function efficiently as a substrate for its self-encoded replicase.

[0180] A self-replicating RNA can include (in addition to any 5′ cap structure) one or more nucleotides having a modified nucleobase. A RNA used with the invention ideally includes only phosphodiester linkages between nucleosides, but in some embodiments it can contain phosphoramidate, phosphorothioate, and/or methylphosphonate linkages.

[0181] The self-replicating RNA molecule may encode a single heterologous polypeptide antigen (i. e. a Coronavirus S antigen) or, optionally, two or more heterologous polypeptide antigens linked together in a way that each of the sequences retains its identity (e.g., linked in series) when expressed as an amino acid sequence. The heterologous polypeptides generated from the self-replicating RNA may then be produced as a fusion polypeptide or engineered in such a manner to result in separate polypeptide or peptide sequences.

[0182] The self-replicating RNA molecules described herein may be engineered to express multiple nucleotide sequences, from two or more open reading frames, thereby allowing co-expression of proteins, such as one, two or more Coronavirus antigens (e.g. one, two or more Coronavirus S antigens) together with cytokines or other immunomodulators, which can enhance the generation of an immune response. Such a self-replicating RNA molecule might be particularly useful, for example, in the production of various gene products (e.g., proteins) at the same time, for example, as a bivalent or multivalent vaccine.

[0183] If desired, the self-replicating RNA molecules can be screened or analyzed to confirm their therapeutic and prophylactic properties using various in vitro or in vivo testing methods that are known to those of skill in the art. For example, vaccines comprising self-replicating RNA molecule can be tested for their effect on induction of proliferation or effector function of the particular lymphocyte type of interest, e.g., B cells, T cells, T cell lines, and T cell clones. For example, spleen cells from immunized mice can be isolated and the capacity of cytotoxic T lymphocytes to lyse autologous target cells that contain a self-replicating RNA molecule that encodes a Coronavirus S antigen. In addition, T helper cell differentiation can be analyzed by measuring proliferation or production of TH1 (IL-2 and IFN-γ) and /or TH2 (IL-4 and IL-5) cytokines by ELISA or directly in CD4+ T cells by cytoplasmic cytokine staining and flow cytometry.

[0184] Self-replicating RNA molecules that encode a Coronavirus S antigen can also be tested for ability to induce humoral immune responses, as evidenced, for example, by induction of B cell production of antibodies specific for a Coronavirus S antigen of interest. These assays can be conducted using, for example, peripheral B lymphocytes from immunized individuals. Such assay methods are known to those of skill in the art. Other assays that can be used to characterize the self-replicating RNA molecules can involve detecting expression of the encoded Coronavirus S antigen by the target cells. For example, FACS can be used to detect antigen expression on the cell surface or intracellularly. Another advantage of FACS selection is that one can sort for different levels of expression; sometimes-lower expression may be desired. Other suitable method for identifying cells which express a particular antigen involve panning using monoclonal antibodies on a plate or capture using magnetic beads coated with monoclonal antibodies.

[0185] In some embodiments, the self-replicating RNA molecules may comprise a sequence selected from SEQ ID NO:176 or SEQ ID NO:178. In some embodiments, the self-replicating RNA molecules comprise a sequence which is at least 70%, at least 75%, at least 80%, at least 85%, at least 90%, at least 95%, at least 96%, at least 97%, at least 98%, or at least 99% identical to a sequence selected SEQ ID NO: 176 or SEQ ID NO: 178. In some embodiments, the self- replicating RNA molecule comprises a fragment of a full-length sequence selected from SEQ ID NO: 176 or SEQ ID NO: 178 wherein the fragment comprises a contiguous stretch of the nucleic acid sequence of the full-length sequence up to 1, 2, 3, 4, 5, 6, 7, 8, 9, 10, 15, 20, 25, or 30 nucleic acids shorter than full-length sequence.

[0186] In some embodiments, the self-replicating RNA molecules comprise from 5′ to 3′ a sequence having SEQ ID NO:172, a construct having a sequence selected from the group consisting of SEQ ID NOS:122-169, and a sequence having SEQ ID NO:173. In some embodiments, the self-replicating RNA molecules comprise from 5′ to 3′ a sequence which is at least 70%, at least 75%, at least 80%, at least 85%, at least 90%, at least 95%, at least 96%, at least 97%, at least 98%, or at least 99% identical to SEQ ID NO: 172, a construct having a sequence which is at least 70%, at least 75%, at least 80%, at least 85%, at least 90%, at least 95%, at least 96%, at least 97%, at least 98%, or at least 99% identical to a sequence selected from the group consisting of SEQ ID NOS:122-169, and a sequence which is at least 70%, at least 75%, at least 80%, at least 85%, at least 90%, at least 95%, at least 96%, at least 97%, at least 98%, or at least 99% identical to SEQ ID NO:173. In some embodiments, the self- replicating RNA molecule comprises from 5′ to 3′ a sequence that is a fragment of SEQ ID NO: 172, a fragment of a full-length construct sequence selected from the group consisting of SEQ ID NOS: 122-169, and a sequence that is a fragment of SEQ ID NO: 173, wherein a fragment comprises a contiguous stretch of the nucleic acid sequence of the full-length sequence up to 1, 2, 3, 4, 5, 6, 7, 8, 9, 10, 15, 20, 25, or 30 nucleic acids shorter than full-length sequence.

[0187] In some embodiments, a DNA sequence encoding a self-replicating RNA molecule is provided, the DNA sequence selected from SEQ ID NO:177 or SEQ ID NO:179. In some embodiments, the DNA sequence encoding a self-replicating RNA molecule comprises a sequence which is at least 70%, at least 75%, at least 80%, at least 85%, at least 90%, at least 95%, at least 96%, at least 97%, at least 98%, or at least 99% identical to a sequence selected from any one of SEQ ID NO: 177 or SEQ ID NO: 179. In some embodiments, the DNA sequence encoding a self-replicating RNA molecule comprises a fragment of a full-length sequence selected from any one of SEQ ID NO: 177 or SEQ ID NO:179 wherein the fragment comprises a contiguous stretch of the nucleic acid sequence of the full-length sequence up to 1, 2, 3, 4, 5, 6, 7, 8, 9, 10, 15, 20, 25, or 30 nucleic acids shorter than full-length sequence.

[0188] In some embodiments, a DNA sequence encoding a self-replicating RNA molecule is provided, said DNA sequence comprising from 5′ to 3′ a DNA sequence having SEQ ID NO:174, a DNA sequence having a sequence selected from the group consisting of SEQ ID NOS:74-121, and a DNA sequence having SEQ ID NO:175. In some embodiments, a DNA sequence encoding a self-replicating RNA molecule is provided, said DNA sequence comprising from 5′ to 3′ a sequence which is at least 70%, at least 75%, at least 80%, at least 85%, at least 90%, at least 95%, at least 96%, at least 97%, at least 98%, or at least 99% identical to SEQ ID NO:174, a DNA sequence which is at least 70%, at least 75%, at least 80%, at least 85%, at least 90%, at least 95%, at least 96%, at least 97%, at least 98%, or at least 99% identical to a sequence selected from the group consisting of SEQ ID NOS:74-121, and a DNA sequence which is at least 70%, at least 75%, at least 80%, at least 85%, at least 90%, at least 95%, at least 96%, at least 97%, at least 98%, or at least 99% identical to SEQ ID NO: 175. In some embodiments, the DNA sequence encoding a self-replicating RNA molecule comprises from 5′ to 3′ a sequence that is a fragment of SEQ ID NO:174, a fragment of a full-length construct sequence selected from the group consisting of SEQ ID NOS:74-121, and a sequence that is a fragment of SEQ ID NO:175, wherein the fragment comprises a contiguous stretch of the nucleic acid sequence of the full-length sequence up to 1, 2, 3, 4, 5, 6, 7, 8, 9, 10, 15, 20, 25, or 30 nucleic acids shorter than full-length sequence.

[0189] The nucleic acid-based vaccine may comprise a viral or a non-viral delivery system. The delivery system (also referred to herein as a delivery vehicle) may have adjuvant effects which enhance the immunogenicity of the encoded Coronavirus S antigen. For example, the nucleic acid molecule may be encapsulated in liposomes, non-toxic biodegradable polymeric microparticles or viral replicon particles (VRPs), or complexed with particles of a cationic oil-in-water emulsion. In some embodiments, the nucleic acid-based vaccine comprises a cationic nano-emulsion (CNE) delivery system or a lipid nanoparticle (LNP) delivery system. In some embodiments, the nucleic acid-based vaccine comprises a non-viral delivery system, i.e., the nucleic acid-based vaccine is substantially free of viral capsid. Alternatively, the nucleic acid-based vaccine may comprise viral replicon particles. In other embodiments, the nucleic acid-based vaccine may comprise a naked nucleic acid, such as naked RNA (e.g. mRNA), but delivery via CNEs or LNPs is preferred.

[0190] In certain embodiments, the nucleic acid-based vaccine comprises a cationic nano-emulsion (CNE) delivery system. CNE delivery systems and methods for their preparation are described in the following reference: WO2012/006380. In a CNE delivery system, the nucleic acid molecule (e.g. RNA) which encodes the antigen is complexed with a particle of a cationic oil-in-water emulsion. Cationic oil-in-water emulsions can be used to deliver negatively charged molecules, such as an RNA molecule to cells. The emulsion particles comprise an oil core and a cationic lipid. The cationic lipid can interact with the negatively charged molecule thereby anchoring the molecule to the emulsion particles. Further details of useful CNEs can be found in the following references: WO2012/006380; WO2013/006834; and WO2013/006837 (the contents of each of which are incorporated herein in their entirety).

[0191] Thus, in a nucleic acid-based vaccine of the invention, an RNA molecule encoding a Coronavirus S antigen may be complexed with a particle of a cationic oil-in-water emulsion. The particles typically comprise an oil core (e.g. a plant oil or squalene) that is in liquid phase at 25° C., a cationic lipid (e.g. phospholipid) and, optionally, a surfactant (e.g. sorbitan trioleate, polysorbate 80); polyethylene glycol can also be included. In some embodiments, the CNE comprises squalene and a cationic lipid, such as 1,2-dioleoyloxy-3-(trimethylammonio)propane (DOTAP). In some preferred embodiments, the delivery system is a non- viral delivery system, such as CNE, and the nucleic acid-based vaccine comprises a self-replicating RNA (mRNA). This may be particularly effective in eliciting humoral and cellular immune responses. Advantages also include the absence of a limiting anti-vector immune response and a lack of risk of genomic integration.

[0192] LNP delivery systems and non-toxic biodegradable polymeric microparticles, and methods for their preparation are described in the following references: WO2012/006376 (LNP and microparticle delivery systems); Geall et al. (2012) PNAS USA. Sep 4; 109(36): 14604-9 (LNP delivery system); and WO2012/006359 (microparticle delivery systems). LNPs are non- virion liposome particles in which a nucleic acid molecule (e.g. RNA) can be encapsulated. The particles can include some external RNA (e.g. on the surface of the particles), but at least half of the RNA (and ideally all of it) is encapsulated. Liposomal particles can, for example, be formed of a mixture of zwitterionic, cationic and anionic lipids which can be saturated or unsaturated, for example; DSPC (zwitterionic, saturated), DlinDMA (cationic, unsaturated), and/or DMG (anionic, saturated). Preferred LNPs for use with the invention include an amphiphilic lipid which can form liposomes, optionally in combination with at least one cationic lipid (such as DOTAP, DSDMA, DODMA, DLinDMA, DLenDMA, etc.). A mixture of DSPC, DlinDMA, PEG-DMG and cholesterol is particularly effective. Other useful LNPs are described in the following references: WO2012/006376; WO2012/030901; WO2012/031046; WO2012/031043; WO2012/006378; WO2011/076807; WO2013/033563; WO2013/006825; WO2014/136086; WO2015/095340; WO2015/095346; WO2016/037053. In some embodiments, the LNPs are RV01 liposomes, see the following references: WO2012/006376 and Geall et al. (2012) PNAS USA. Sep 4; 109(36): 14604-9.

### Pharmaceutical Compositions; Immunogenic Compositions

[0193] The disclosure provides compositions comprising a nucleic acid comprising a sequence which encodes a Coronavirus polypeptide, for example a Coronavirus S antigen. The composition may be a pharmaceutical composition, e.g., an immunogenic composition or a vaccine composition. Accordingly, the composition may also comprise a pharmaceutically acceptable carrier. In some embodiments, the Coronavirus is SARS CoV-2.

[0194] A “pharmaceutically acceptable carrier” includes any carrier that does not itself induce the production of antibodies harmful to the individual receiving the composition. Suitable carriers are typically large, slowly metabolized macromolecules such as proteins, polysaccharides, polylactic acids, polyglycolic acids, polymeric amino acids, amino acid copolymers, sucrose, trehalose, lactose, and lipid aggregates (such as oil droplets or liposomes). Such carriers are well known to those of ordinary skill in the art. The compositions may also contain a pharmaceutically acceptable diluent, such as water, saline, glycerol, etc. Additionally, auxiliary substances, such as wetting or emulsifying agents, pH buffering substances, and the like, may be present. Sterile pyrogen-free, phosphate-buffered physiologic saline is a typical carrier.

[0195] Pharmaceutical compositions may include the constructs, nucleic acid sequences, and/or polypeptide sequences described elsewhere herein in plain water (e.g. “w.f.i.”) or in a buffer e.g. a phosphate buffer, a Tris buffer, a borate buffer, a succinate buffer, a histidine buffer, or a citrate buffer. Buffer salts will typically be included in the 5-20 mM range. Pharmaceutical compositions may have a pH between 5.0 and 9.5 e.g. between 6.0 and 8.0. Compositions may include sodium salts (e.g. sodium chloride) to give tonicity. A concentration of 10±2 mg/mL NaCl is typical, e.g. about 9 mg/mL. Compositions may include metal ion chelators. These can prolong RNA stability by removing ions which can accelerate phosphodiester hydrolysis. Thus a composition may include one or more of EDTA, EGTA, BAPTA, pentetic acid, etc.. Such chelators are typically present at between 10-500 µM e.g. 0.1 mM. A citrate salt, such as sodium citrate, can also act as a chelator, while advantageously also providing buffering activity. Pharmaceutical compositions may have an osmolality of between 200 mOsm/kg and 400 mOsm/kg, e.g. between 240-360 mOsm/kg, or between 290-310 mOsm/kg. Pharmaceutical compositions may include one or more preservatives, such as thiomersal or 2-phenoxyethanol. Mercury-free compositions are preferred, and preservative-free vaccines can be prepared. Pharmaceutical compositions may be aseptic or sterile. Pharmaceutical compositions may be non-pyrogenic e.g. containing <1 EU (endotoxin unit, a standard measure) per dose, and preferably <0.1 EU per dose. Pharmaceutical compositions may be gluten free. Pharmaceutical compositions may be prepared in unit dose form. In some embodiments a unit dose may have a volume of between 0.1 -1.0 mL e.g. about 0.5 mL.

[0196] In some embodiments, the compositions disclosed herein are immunogenic composition that, when administered to a subject, induce a humoral and/or cellular antigen-specific immune response (i.e. an immune response which specifically recognizes a naturally occurring Coronavirus polypeptide). For example, an immunogenic composition may induce a memory T and/or B cell population relative to an untreated subject following Coronavirus infection, particularly in those embodiments where the composition comprises a nucleic acid comprising a sequence which encodes a Coronavirus S antigen or comprises a Coronavirus antigen. In some embodiments, the subject is a vertebrate, such as a mammal e.g. a human or a veterinary mammal.

[0197] The compositions of the invention can be formulated as vaccine compositions. The vaccine will comprise an immunologically effective amount of antigen. By “an immunologically effective amount” is intended that the administration of that amount to a subject, either in a single dose or as part of a series, is effective for inducing a measurable immune response against Coronavirus in the subject. This amount varies depending upon the health and physical condition of the individual to be treated, age, the taxonomic group of individual to be treated (e.g. human, non-human primate, etc.), the capacity of the individual’s immune system to synthesize antibodies, the degree of protection desired, the formulation of the composition or vaccine, the treating doctor’s assessment of the medical situation, the severity of the disease, the potency of the compound administered, the mode of administration, and other relevant factors. It is expected that the amount will fall in a relatively broad range that can be determined through routine trials. Vaccines as disclosed herein may either be prophylactic (i.e. to prevent infection) or therapeutic (i.e. to treat infection), but will typically be prophylactic. In some embodiments, the vaccine compositions disclosed herein may induce an effective immune response against a Coronavirus infection, i.e., a response sufficient for treatment or prevention of a Coronavirus infection.

### Methods of Use/Uses

[0198] In some embodiments are provided methods for inducing an immune response against a Coronavirus infection in a subject in need thereof comprising a step of administering an immunologically effective amount of a construct or composition as disclosed herein. In some embodiments are provided the use of the constructs or compositions disclosed herein for inducing an immune response to a Coronavirus S antigen in a subject in need thereof. In some embodiments are provided the use of the constructs or compositions disclosed herein for inducing an immune response against a Coronavirus infection in a subject. In some embodiments are provided use of the construct or composition as disclosed herein in the manufacture of a medicament inducing an immune response to a Coronavirus infection in a subject. In some embodiments are provided the use of the constructs or compositions disclosed herein for inducing an immune response against a SARS CoV-2 infection in a subject. In some embodiments are provided use of the construct or composition as disclosed herein in the manufacture of a medicament inducing an immune response to a SARS CoV-2 infection in a subject. By “subject” is intended a vertebrate, such as a mammal e.g. a human or a veterinary mammal. In some embodiments the subject is human. In some embodiments the composition comprises an RNA molecule encoding a polypeptide selected from the group consisting of SEQ ID NOs:26-73. In some embodiments, the composition comprises an RNA molecule encoding a polypeptide which is at least 70%, at least 75%, at least 80%, at least 85%, at least 90%, at least 95%, at least 96%, at least 97%, at least 98%, or at least 99% identical to a sequence selected from the group consisting of SEQ ID NOS:26-73. In some embodiments, the composition comprises an RNA molecule encoding a polypeptide which comprises a fragment of a full-length sequence selected from the group consisting of SEQ ID NOs:26-73, wherein the fragment comprises a contiguous stretch of the amino acid sequence of the full-length sequence up to 1, 2, 3, 4, 5, 6, 7, 8, 9, or 10 amino acids shorter than full-length sequence.

### Routes of Administration/Dosages

[0199] Compositions disclosed herein will generally be administered directly to a subject. Direct delivery may be accomplished by parenteral injection, typically intramuscularly.

[0200] A dose of a nucleic acid (e.g. a nucleic acid-based vaccine) may have <10(µg nucleic acid; e.g. from 0.001-10 µg, such as about 1 µg, 2.5 µg, 5 µg, 7.5 µg or 10 µg, but expression can be seen at much lower levels; e.g. using <1 µg/dose, <100 ng/dose, <10 ng/dose, <1 ng/dose, etc. Similarly, a dose of a protein antigen may have <10 µg protein; e.g. from 1-10 µg, such as about 1 µg, 2.5 µg, 5 µg, 7.5 µg or 10 µg.

### Processes of Manufacture/Formulation

[0201] Processes for the manufacture of self-replicating RNA are provided herein. In some embodiments, the process of manufacturing a self-replicating RNA comprises a step of in vitro transcription (IVT) as described elsewhere herein. In some embodiments, the process of manufacturing a self-replicating RNA comprises a step of IVT to produce a RNA, and further comprises a step of combining the RNA with a non-viral delivery system as described elsewhere herein. In some embodiments, the process of manufacturing a self-replicating RNA comprises a step of IVT to produce a RNA, and further comprises a step of combining the RNA with a CNE delivery system as described elsewhere herein. In some embodiments, the process of manufacturing a self-replicating RNA comprises IVT to produce a RNA, and further comprises combining the RNA with a LNP delivery system as described herein.

### Sequence Identity

[0202] Identity or homology with respect to a sequence is defined herein as the percentage of amino acid residues in the candidate sequence that are identical with the reference amino acid sequence after aligning the sequences and introducing gaps, if necessary, to achieve the maximum percent sequence identity, and not considering any conservative substitutions as part of the sequence identity.

[0203] Sequence identity can be determined by standard methods that are commonly used to compare the similarity in position of the amino acids of two polypeptides. Using a computer program such as BLAST or FASTA, two polypeptides are aligned for optimal matching of their respective amino acids (either along the full length of one or both sequences or along a pre-determined portion of one or both sequences). The programs provide a default opening penalty and a default gap penalty, and a scoring matrix such as PAM 250 [a standard scoring matrix; see Dayhoff et al., in Atlas of Protein Sequence and Structure, vol. 5, supp. 3 (1978)] can be used in conjunction with the computer program. For example, the percent identity can then be calculated as: the total number of identical matches multiplied by 100 and then divided by the sum of the length of the longer sequence within the matched span and the number of gaps introduced into the shorter sequences in order to align the two sequences.

[0204] Where the present disclosure refers to a sequence by reference to a UniProt or Genbank accession code, the sequence referred to is the current version at the filing date of the present application.

### Part A, Embodiments of the Invention

[0205] Part A, Embodiment 1. A construct comprising a nucleic acid sequence selected from the group consisting of:
[0206] (a) a nucleic acid sequence encoding a polypeptide comprising the amino acid sequence of SEQ ID NO:49 and SEQ ID NO:26;
[0207] (b) a nucleic acid sequence comprising the DNA sequence of SEQ ID NO:97 and SEQ ID NO:74;
[0208] (c) a nucleic acid sequence comprising the RNA sequence of SEQ ID NO:145 and SEQ ID NO:122; and
[0209] (d) a variant or fragment of (a)-(c).

[0210] Part A, Embodiment 2. The construct of Part A, Embodiment 1, wherein the nucleic acid is a RNA molecule.

[0211] Part A, Embodiment 3. The construct of Part A, Embodiments 1-2, wherein the RNA is a self-replicating RNA molecule.

[0212] Part A, Embodiment 4. A self-replicating RNA molecule comprising a construct encoding a polypeptide comprising a Coronavirus spike (S) antigen, or an immunogenic variant or fragment thereof.

[0213] Part A, Embodiment 5. The construct of Part A, Embodiment 4, wherein the construct encodes a prefusion stabilized SARS CoV-2 S antigen, or an immunogenic variant or fragment thereof.

[0214] Part A, Embodiment 6. The construct of any one of Part A, Embodiments 4-5, wherein the construct encodes a prefusion stabilized Coronavirus S antigen, or an immunogenic variant or fragment thereof.

[0215] Part A, Embodiment 7. The construct of Part A, Embodiment 6, further comprising proline substitutions at residues 986 and 987 of SEQ ID NO: 1.

[0216] Part A, Embodiment 8. The construct of any of Part A, Embodiments 6-7, further comprising a GSAS (SEQ ID NO:190) substitution at the furin cleavage site (residues 682-685 of SEQ ID NO: 1).

[0217] Part A, Embodiment 9. The construct of any of Part A, Embodiments 4-8, further comprising a C-terminal transmembrane sequence.

[0218] Part A, Embodiment 10. The construct of any of Part A, Embodiments 4-8, further comprising a sequence C-terminal T4 fibritin trimerization (foldon) motif.

[0219] Part A, Embodiment 11. A self-replicating RNA molecule comprising a nucleic acid sequence selected from the group consisting of SEQ ID NO:4 and SEQ ID NO:9.

[0220] Part A, Embodiment 12. A DNA molecule encoding the self-replicating RNA molecule of Part A, Embodiments 3-11.

[0221] Part A, Embodiment 13. The DNA molecule of Part A, Embodiment 12 comprising a nucleic acid sequence selected from the group consisting of SEQ ID NO:5 and SEQ ID NO:10.

[0222] Part A, Embodiment 14. A composition comprising an immunologically effective amount of one or more of the constructs of any of Part A, Embodiments 1-2 or the self-replicating RNA molecules of any of Part A, Embodiments 3-11.

[0223] Embodiment 15. The composition according to Part A, Embodiment 14 comprising the self-replicating RNA molecule of embodiment 11.

[0224] Part A, Embodiment 16. The composition according to any of embodiments 14-15, wherein the composition comprises a non-viral delivery material, such as a submicron cationic oil-in-water emulsion; a liposome; or a biodegradable polymeric microparticle delivery system.

[0225] Part A, Embodiment 17. The composition according to embodiment 16, wherein the composition comprises a submicron cationic oil-in-water emulsion.

[0226] Part A, Embodiment 18. The composition according to embodiment 16, wherein the composition comprises a liposome.

[0227] Part A, Embodiment 19. The composition according to any of embodiments 14-18 wherein the composition further comprises a nucleic acid sequence which encodes an additional antigen.

[0228] Part A, Embodiment 20. The composition according to any of embodiments 14-19 wherein the composition further comprises a self-replicating RNA which encodes an additional antigen.

[0229] Part A, Embodiment 21. The composition according to any of embodiments 14-20 wherein the composition is pharmaceutically acceptable for administration to a subject by intramuscular injection.

[0230] Part A, Embodiment 22. A method of inducing an immune response against a Coronavirus infection in a subject in need thereof, which comprises administering to said subject an immunologically effective amount of the composition of embodiments 14-21.

[0231] Part A, Embodiment 23. The method according to embodiment 22 wherein the immune response is characterized by immunological memory against the Coronavirus and/or an effective Coronavirus-responsive memory T cell population.

[0232] Part A, Embodiment 24. The method according to any of embodiments 22-23 wherein the subject is human.

[0233] Part A, Embodiment 25. A process for producing an RNA-based vaccine comprising a step of transcribing the DNA of embodiment 13 to produce an RNA comprising a coding region for the antigen.

[0234] Part A, Embodiment 26. The process of embodiment 25, wherein said transcription is in vitro.

[0235] Part A, Embodiment 27. The process of embodiments 25, wherein said transcription is in vivo.

[0236] Part A, Embodiment 28. The process of any embodiment 25-27, further comprising a step of formulating the RNA comprising the coding region for the antigen with a delivery system.

[0237] Part A, Embodiment 29. The process of embodiment 28, wherein the delivery system is a non-viral delivery material.

[0238] Part A, Embodiment 30. The process of embodiment 29, wherein the delivery system is a submicron cationic oil-in-water emulsion.

[0239] Part A, Embodiment 31. The process of any of embodiments 25-30, wherein the delivery system is a liposome.

[0240] Part A, Embodiment 32. The process of embodiment 31, wherein said liposome comprises a lipid comprising a tertiary amine.

[0241] Part A, Embodiment 33. A composition produced by the process of any of embodiments 25-32.

[0242] Part A, Embodiment 34. Use of the self-replicating RNA of embodiments 1-8; the construct of embodiment 9; the RNA molecule of embodiment 10; the self-replicating RNA molecule of embodiments 11-12; or a composition of any one of embodiments 14-21 for inducing an immune response to a Coronavirus infection in a subject.

[0243] Part A, Embodiment 35. Use of the construct of embodiments 1-9; the vector of embodiment 10; the self-replicating RNA molecule of embodiments 11-12; or a composition of any one of embodiments 14-21 in the manufacture of a medicament inducing an immune response against a Coronavirus infection in a subject.

[0244] Part A, Embodiment 36. Use of the self-replicating RNA of embodiments 1-8; the construct of embodiment 9; the RNA molecule of embodiment 10; the self-replicating RNA molecule of embodiments 11-12; or a composition of any one of embodiments 14-21 for inducing an immune response to a SARS CoV-2 infection in a subject.

[0245] Part A, Embodiment 35. Use of the construct of embodiments 1-9; the vector of embodiment 10; the self-replicating RNA molecule of embodiments 11-12; or a composition of any one of embodiments 14-21 in the manufacture of a medicament inducing an immune response against a SARS CoV-2 infection in a subject.

### Part B, Embodiments of the Invention

[0246] Part B, Embodiment 1. A construct comprising a nucleic acid sequence encoding an antigen, wherein the antigen comprises a heterologous signal sequence, a mutation with respect to the wild-type sequence which affects retention of the antigen in the endoplasmic reticulum (ER), or a combination thereof.

[0247] Part B, Embodiment 2. The construct of Part B, Embodiment 1, wherein said antigen is a coronavirus antigen, preferably a coronavirus S protein.

[0248] Part B, Embodiment 3. The construct of Part B, Embodiment 2, wherein said coronavirus S protein is a SARS CoV-2 S protein.

[0249] Part B, Embodiment 4. The construct of Part B, Embodiment 3, wherein the heterologous signal sequence replaces residues 1-16 of the SARS CoV-2 S protein as shown in SEQ ID NO:1, or corresponding residues in another SARS CoV-2 S protein sequence.

[0250] Part B, Embodiment 5. The construct of Part B, Embodiment 3, wherein the heterologous signal sequence replaces residues 1-18 of the SARS CoV-2 S protein as shown in SEQ ID NO:1, or corresponding residues in another SARS CoV-2 S protein sequence.

[0251] Part B, Embodiment 6. The construct of any one of Part B, Embodiments 1 to 5, wherein the heterologous signal sequence has a sequence selected from:
[0252] a) a Gaussian Luciferase signal sequence as shown in SEQ ID NO:2,
[0253] b) a human CD5 signal sequence as shown in SEQ ID NO:3,
[0254] c) a human CD33 signal sequence as shown in SEQ ID NO:4,
[0255] d) a human IL2 signal sequence as shown in SEQ ID NO:5,
[0256] e) a human IgE signal sequence as shown in SEQ ID NO:6,
[0257] f) a human Light Chain Kappa signal sequence as shown in SEQ ID NO:7,
[0258] g) a JEV short signal sequence as shown in SEQ ID NO:8,
[0259] h) a JEV long signal sequence as shown in SEQ ID NO:9,
[0260] i) a Mouse Light Chain Kappa signal sequence as shown in SEQ ID NO:10,
[0261] j) a SSP signal sequence as shown in SEQ ID NO:11,
[0262] k) a Gaussian Luciferase (AKP) signal sequence as shown in SEQ ID NO:12, and
[0263] l) a variant of any one of sequences (a)-(k) having 1, 2, 3, 4 or 5 amino acid residue deletions, insertions or substitutions.

[0264] Part B, Embodiment 7. The construct of any one of Part B, Embodiments 1 to 6, wherein the antigen is a SARS CoV-2 S protein, and wherein said mutation with respect to the wild-type sequence is selected from:
[0265] a) the substitution of residues K1269 and H1271 as shown in SEQ ID NO:1 to alanine residues, or corresponding substitutions in another SARS Cov-2 S protein sequence, and
[0266] b) the deletion of residues 1261-1273 of SEQ ID NO:1, or of corresponding residues in another SARS Cov-2 S protein sequence.

[0267] Part B, Embodiment 8. The construct of any one of Part B, Embodiments 1 to 7, wherein the antigen is a coronavirus S protein and comprises one or more mutations with respect to the wild-type sequence which stabilize the prefusion form of the coronavirus S protein.

[0268] Part B, Embodiment 9. The construct of Part B, Embodiment 8, wherein the coronavirus S protein is a SARS CoV-2 S protein, and wherein said one or more mutations comprise the substitutions of residues ⁹⁸⁶KV⁹⁸⁷ as shown in SEQ ID NO:1 to ⁹⁸⁸PP⁹⁸⁷, and/or the substitution of residues ⁶⁸²RRAR⁶⁸⁵ (SEQ ID NO:188) as shown in SEQ ID NO:1 to ⁶⁸²GSAS⁶⁸⁵ (SEQ ID NO:190) or corresponding mutations in another SARS Cov-2 S protein sequence.

[0269] Part B, Embodiment 10. The construct of any one of Part B, Embodiments 1 to 9, wherein the antigen is a coronavirus S protein, and wherein the native transmembrane and cytosolic domains of the coronavirus S protein are replaced by a heterologous trimerization domain, preferably a C-terminal T4 fibritin trimerization (foldon) motif.

[0270] Part B, Embodiment 11. The construct of Part B, Embodiment 10, wherein said the coronavirus S protein is a SARS CoV-2 S protein, and wherein residues 1208-1273 of the sequence shown in SEQ ID NO:1, or corresponding mutations in another SARS Cov-2 S protein sequence, are replaced by a C-terminal T4 fibritin trimerization (foldon) motif having the sequence shown in SEQ ID NO:24.

[0271] Part B, Embodiment 12. The construct of any one of Part B, Embodiments 1 to 11, wherein the antigen is a SARS CoV-2 S protein, and wherein said S protein:
[0272] a) has an amino acid sequence selected from SEQ ID NOs:27-73, or a variant which is at least 90% identical thereto;
[0273] b) is encoded by a DNA sequence having a sequence selected from SEQ ID NOs:75-121, or a variant which is at least 90% identical thereto; or
[0274] c) is encoded by an RNA sequence having a sequence selected from SEQ ID NOs:123-169, or a variant which is at least 90% identical thereto.

[0275] Part B, Embodiment 13. The construct of any one of Part B, Embodiments 1 to 12, wherein said nucleic acid is an RNA molecule.

[0276] Part B, Embodiment 14. A self-replicating RNA comprising the construct of Part B, Embodiment 13.

[0277] Part B, Embodiment 15. The self-replicating RNA of Part B, Embodiment 14 comprising the elements of a VEE TC-83 replicon including viral nonstructural proteins 1-4 (nsP1-4), followed by a subgenomic promoter, and a construct encoding the antigen.

[0278] Part B, Embodiment 16. The self-replicating RNA of Part B, Embodiment 15, wherein the VEE TC-83 replicon has the sequence shown in SEQ ID NO:171, and the construct encoding the S coronavirus protein is inserted immediately after residue 7561.

[0279] Part B, Embodiment 17. A self-replicating RNA comprising from 5′ to 3′ a sequence having SEQ ID NO: 172, a construct having a sequence selected from the group consisting of SEQ ID NOS:122-169, and a sequence having SEQ ID NO:173.

[0280] Part B, Embodiment 18. A DNA molecule encoding the self-replicating RNA of any one of Part B, Embodiments 14 to 17.

[0281] Part B, Embodiment 19. A composition comprising an immunologically effective amount of one or more of the constructs of any of one of Part B, Embodiments 1 to 13, the self-replicating RNA of any one of Part B, Embodiments 14 to 17 or the DNA molecule of Part B, Embodiment 18.

[0282] Part B, Embodiment 20. The composition of Part B, Embodiment 19, wherein the composition comprises a non-viral delivery material, such as a submicron cationic oil-in-water emulsion; a liposome; or a biodegradable polymeric microparticle delivery system.

[0283] Part B, Embodiment 21. The composition of Part B, Embodiment 20, wherein the composition comprises a submicron cationic oil-in-water emulsion.

[0284] Part B, Embodiment 22. The composition according to Part B, Embodiment 20, wherein the composition comprises a liposome.

[0285] Part B, Embodiment 23. The composition of any of Part B, Embodiments 19 to 22 wherein the composition further comprises a nucleic acid sequence which encodes an additional antigen.

[0286] Part B, Embodiment 24. The composition of any of Part B, Embodiments 19 to 22 wherein the composition further comprises a self-replicating RNA which encodes an additional antigen.

[0287] Part B, Embodiment 25. The composition of any of Part B, Embodiments 19 to 24 wherein the composition is pharmaceutically acceptable for administration to a subject by intramuscular injection.

[0288] Part B, Embodiment 26. A process for producing an RNA-based vaccine comprising a step of transcribing the DNA molecule of Part B, Embodiment 18 to produce a self-replicating RNA comprising a coding region for the coronavirus S protein.

[0289] Part B, Embodiment 27. The process of Part B, Embodiment 26, wherein said transcription is in vitro.

[0290] Part B, Embodiment 28. The process of Part B, Embodiments 26, wherein said transcription is in vivo.

[0291] Part B, Embodiment 29. The process of Part B, Embodiment 26, 27 or 28, further comprising a step of formulating the self-replicating RNA comprising the coding region for the coronavirus S protein with a delivery system.

[0292] Part B, Embodiment 30. The process of Part B, Embodiment 29, wherein the delivery system is a non-viral delivery material.

[0293] Part B, Embodiment 31. The process of Part B, Embodiment 30, wherein the delivery system is a submicron cationic oil-in-water emulsion.

[0294] Part B, Embodiment 32. The process of Part B, Embodiment 30, wherein the delivery system is a liposome.

[0295] Part B, Embodiment 33. The process of Part B, Embodiment 32, wherein said liposome comprises a lipid comprising a tertiary amine.

[0296] Part B, Embodiment 34. A composition produced by the process of any one of Part B, Embodiments 26 to 33.

[0297] Part B, Embodiment 35. A method of inducing an immune response against a Coronavirus infection in a subject in need thereof, which comprises administering to said subject an immunologically effective amount of the construct of any one of Part B, Embodiments 2 to 13, the self-replicating RNA of any one of Part B, Embodiments 13 to 17, the DNA molecule of Part B, Embodiment 18, or the composition of any one of Part B, Embodiments 19 to 25 or 34.

[0298] Part B, Embodiment 36. The method of Part B, Embodiment 35 wherein the immune response is characterized by immunological memory against the Coronavirus and/or an effective Coronavirus-responsive memory T cell population.

[0299] Part B, Embodiment 37. The method of Part B, Embodiment 26 or 27 wherein the subject is human.

[0300] Part B, Embodiment 38. The construct of any one of Part B, Embodiments 1 to 13, the self-replicating RNA of any one of Part B, Embodiments 13 to 17, the DNA molecule of Part B, Embodiment 18, or the composition of any one of Part B, Embodiments 19 to 25 or 34, for use in therapy.

[0301] Part B, Embodiment 39. The construct of any one of Part B, Embodiments 2 to 13, the self-replicating RNA of any one of Part B, Embodiments 13 to 17, the DNA molecule of Part B, Embodiment 18, or the composition of any one of Part B, Embodiments 19 to 25 or 34, for use in preventing or treating a coronavirus infection in a subject.

[0302] Part B, Embodiment 40. The construct of any one of Part B, Embodiments 2 to 13, the self-replicating RNA of any one of Part B, Embodiments 13 to 17, the DNA molecule of Part B, Embodiment 18, or the composition of any one of Part B, Embodiments 19 to 25 or 34, for use in preventing or treating a SARS CoV-2 infection in a subject.

[0303] Part B, Embodiment 41. Use of the construct of any one of Part B, Embodiments 2 to 13, the self-replicating RNA of any one of Part B, Embodiments 13 to 17, the DNA molecule of Part B, Embodiment 18, or the composition of any one of Part B, Embodiments 19 to 25 or 34 for inducing an immune response to a Coronavirus infection in a subject.

[0304] Part B, Embodiment 42. Use of the construct of any one of Part B, Embodiments 2 to 13, the self-replicating RNA of any one of Part B, Embodiments 13 to 17, the DNA molecule of Part B, Embodiment 18, or the composition of any one of Part B, Embodiments 19 to 25 or 34 in the manufacture of a medicament inducing an immune response against a Coronavirus infection in a subject.

[0305] Part B, Embodiment 43. Use of the construct of any one of Part B, Embodiments 2 to 13, the self-replicating RNA of any one of Part B, Embodiments 13 to 17, the DNA molecule of Part B, Embodiment 18, or the composition of any one of Part B, Embodiments 19 to 25 or 34 for inducing an immune response to a SARS CoV-2 infection in a subject.

[0306] Part B, Embodiment 44. Use of the construct of any one of Part B, Embodiments 2 to 13, the self-replicating RNA of any one of Part B, Embodiments 13 to 17, the DNA molecule of Part B, Embodiment 18, or the composition of any one of Part B, Embodiments 19 to 25 or 34 in the manufacture of a medicament inducing an immune response against a SARS CoV-2 infection in a subject.

### General

[0307] Unless otherwise explained, all technical and scientific terms used herein have the same meaning as commonly understood by one of ordinary skill in the art to which this disclosure belongs. The singular terms “a,” “an,” and “the” include plural referents unless context clearly indicates otherwise. Similarly, the word “or” is intended to include “and” unless the context clearly indicates otherwise. The term “plurality” refers to two or more. Additionally, numerical limitations given with respect to concentrations or levels of a substance, such as solution component concentrations or ratios thereof, and reaction conditions such as temperatures, pressures and cycle times are intended to be approximate. The term “about” used herein is intended to mean the amount ±10%.

[0308] The invention will be further described by reference to the following, non-limiting, figures and examples.

### EXAMPLES

### Example 1. Project Summary

[0309] The present inventors initiated work on a Coronavirus vaccine using the SAM platform - synthetic, self-amplifying mRNA derived from the alphavirus genome, expressing antigens of interest. The SAM constructs are evaluated for robust antigen production and antigenicity and further tested for their immunogenicity and efficacy using in vivo models.

### Methods

[0310] The SAM vector VEE TC-83 (SEQ ID NO:171, FIG. 1)was used as the background construct for cloning in the Examples. The empty vector is shown in SEQ ID NO:171; the insert encoding the SARS-CoV2 S antigen starts immediately after nucleotide 7561. The sequence of the DNA plasmid encoding the SAM VEE TC-83 is shown in FIG. 8 (SEQ ID NO:170).

### Example 2. Design of SARS-CoV2 S Antigen Constructs

[0311] The inventors designed full length and ecto domain SARS-CoV2 S antigens. The structure of the wild-type 2019-nCoV S protein (SEQ ID NO:1) is shown in FIG. 33A. All constructs contained proline substitutions K986P and V987P to help stabilize the prefusion form of the S protein and a “GSAS” (SEQ ID NO:190) substitution (residues 682-685) in the furin cleavage site Wrapp et al, 2020, Science) (FIG. 33B, FIG. 33C). In all ecto domain constructs, the entire C-terminus (including the transmembrane domain) after amino acid 1208 was removed and replaced by a T4 fibritin trimerization motif (foldon) in order to promote the formation of trimeric complexes (FIG. 33C). The amino acid sequence of the T4 fibritin trimerization motif (foldon) is shown in SEQ ID NO:24, and its DNA sequence is shown in SEQ ID NO:25.

[0312] The first design of SAM Coronavirus constructs (constructs A and B of FIGS. 37 and 38) includes cloning the sequence encoding the Coronavirus S protein under the subgenomic promoter in a SAM vector. A series of modifications to the S protein were made (Inset 1). In addition, the wild type sequence was modified by:
[0313] i. Codon optimization of the coding sequence for the antigen; and
[0314] ii. Removal of several restriction sites.

Inset 1

SAM constructs

| | |
|---|---|
| Construct | Description |
| A | • proline substitutions at residues 986 and 987, |
| | • a “GSAS” (SEQ ID NO:190) substitution at the furin cleavage site (residues 682-685) |
| | • protein native sequence for transmembrane and C terminal domains |
| B | • proline substitutions at residues 986 and 987, |
| | • a “GSAS” (SEQ ID NO:190) substitution at the furin cleavage site (residues 682-685) |
| | • C-terminal T4 fibritin trimerization motif (foldon) |

Construct A is described by sequence identifier in Table 3; construct B is described by sequence identifier in Table 2.

[0315] The present inventors introduced further modifications with the aim of increasing the expression and secretion of the ecto domain version of the SARS-CoV Spike (S) protein or the cell-surface expression of the full-length version of the protein. In most constructs, the 16 or 18 N-terminal residues (putative SARS-CoV S signal sequence) of SARS-CoV S protein were replaced by heterologous signal sequences selected from among those that are known to promote good expression and secretion from plasmids. See, e.g., Cat. No. OGS1498, PSF-CMV-PURO-NH2-GAUS - Gaussia (Luciferase) Secretion Plasmid, Sigma-Adrich. Those selected by the inventors for use with self-replicating RNA systems are set forth in Table 1, FIG. 34, FIG. 35. In addition, in order to prevent retention of the protein in the endoplasmic reticulum (ER), mutations were introduced in the ER retention signal (K1269A and H1271A) or the entire C-terminal domain was deleted (residues 1261-1273) in certain full length constructs, as described by McBride, C. E., et al. (2007). “The cytoplasmic tail of the severe acute respiratory syndrome coronavirus spike protein contains a novel endoplasmic reticulum retrieval signal that binds COPI and promotes interaction with membrane protein.” J Virol 81(5): 2418-2428.

[0316] All designed SARS-COV2 S protein ectodomain and full length constructs are shown in Tables 2 and 3 respectively.

TABLE 1

Heterologous signal sequences

| | | | |
|---|---|---|---|
| Signal sequence | Protein sequence | DNA sequence | RNA sequence |
| Gaussian Luciferase signal sequence | SEQ ID NO:2 | SEQ ID NO:13 | SEQ ID NO:258 |
| human CD5 signal sequence | SEQ ID NO:3 | SEQ ID NO:14 | SEQ ID NO:259 |
| human CD33 signal sequence | SEQ ID NO:4 | SEQ ID NO:15 | SEQ ID NO:260 |
| human IL2 signal sequence | SEQ ID NO:5 | SEQ ID NO:16 | SEQ ID NO:261 |
| human IgE signal sequence | SEQ ID NO:6 | SEQ ID NO:17 | SEQ ID NO:262 |
| human Light Chain Kappa signal sequence | SEQ ID NO:7 | SEQ ID NO:18 | SEQ ID NO:263 |
| JEV short signal sequence | SEQ ID NO:8 | SEQ ID NO:19 | SEQ ID NO:264 |
| JEV long signal sequence | SEQ ID NO:9 | SEQ ID NO:20 | SEQ ID NO:265 |
| Mouse Light Chain Kappa signal sequence | SEQ ID NO:10 | SEQ ID NO:21 | SEQ ID NO:266 |
| SSP signal sequence | SEQ ID NO:11 | SEQ ID NO:22 | SEQ ID NO:267 |
| Gaussian Luciferase (AKP) signal sequence | SEQ ID NO:12 | SEQ ID NO:23 | SEQ ID NO:268 |

[0317] All ecto domain constructs contain proline substitutions K986P and V987P, a “GSAS” (SEQ ID NO:190) substitution (residues 682-685) in the furin cleavage site, and the replacement of the entire C-terminus (after amino acid 1208) by a T4 fibritin trimerization motif (foldon)

TABLE 2

Ecto domain SARS-COV2 S protein constructs

| Construct | Signal sequence | SEQ ID NOs Protein DNA RNA | | |
|---|---|---|---|---|
| Construct B - pJW18 (COVID19 SPIKE Protein with 2Xp_GSAS_T4 Trimer Motif); (also referred to as ‘Spike_ECTO-2P SAM’ and ‘SARS-CoV-2 spike Ecto SAM’) | Native | 26 | 74 | 122 |
| pKL049 (COVID19 SPIKE Protein with 2Xp_GSAS_T4 Trimer Motif_GauLUCss(16aa)) | First 16 amino acids have been replaced by Gaussian Luciferase signal sequence | 27 | 75 | 123 |
| pKL050 (COVID19 SPIKE Protein with 2Xp_GSAS_T4 Trimer Motif_GauLUCss(18aa)) | First 18 amino acids replaced by Gaussian Luciferase signal sequence | 28 | 76 | 124 |
| pKL051 (COVID19 SPIKE Protein with 2Xp_GSAS_T4 Trimer Motif_CD5ss(16aa)) | First 16 amino acids have been replaced by human CD5 signal sequence | 29 | 77 | 125 |
| pKL052 (COVID19 SPIKE Protein with 2Xp_GSAS_T4 Trimer Motif_CD5ss(18aa)) | First 18 amino acids replaced by human CD5 signal sequence | 30 | 78 | 126 |
| pKL053 (COVID19 SPIKE Protein with 2Xp_GSAS_T4 Trimer Motif_CD33ss(16aa)) | First 16 amino acids have been replaced by human CD33 signal sequence | 31 | 79 | 127 |
| pKL054 (COVID19 SPIKE Protein with 2Xp_GSAS_T4 Trimer Motif_CD33ss(18aa)) | First 18 amino acids replaced by human CD33 signal sequence | 32 | 80 | 128 |
| pKL055 (COVID19 SPIKE Protein with 2Xp_GSAS_T4 Trimer Motif_hIL2ss(16aa)) | First 16 amino acids have been replaced by human Interleukin-2 signal sequence | 33 | 81 | 129 |
| pKL056 (COVID19 SPIKE Protein with 2Xp_GSAS_T4 Trimer Motif_hIL2ss(18aa)) | First 18 amino acids replaced by human Interleukin-2 signal sequence | 34 | 82 | 130 |
| pKL057 (COVID19 SPIKE Protein with 2Xp_GSAS_T4 Trimer Motif_hlgEss(16aa)) | First 16 amino acids have been replaced by human IgE signal sequence | 35 | 83 | 131 |
| pKL058 (COVID19 SPIKE Protein with 2Xp_GSAS_T4 Trimer Motif_hlgEss(18aa)) | First 18 amino acids replaced by human IgE signal sequence | 36 | 84 | 132 |
| pKL059 (COVID19 SPIKE Protein with 2Xp_GSAS_T4 Trimer Motif_hLCKss(16aa)) | First 16 amino acids have been replaced by human Light Chain Kappa signal sequence | 37 | 85 | 133 |
| pKL060 (COVID19 SPIKE Protein with 2Xp_GSAS_T4 Trimer Motif_hLCKss(18aa)) | First 18 amino acids replaced by human Light Chain Kappa signal sequence | 38 | 86 | 134 |
| pKL061 (COVID19 SPIKE Protein with 2Xp_GSAS_T4 Trimer Motif_JEVSss(16aa)) | First 16 amino acids have been replaced by JEV short signal sequence | 39 | 87 | 135 |
| pKL062 (COVID19 SPIKE Protein with 2Xp_GSAS_T4 Trimer Motif_JEVSss(18aa)) | First 18 amino acids replaced by JEV short signal sequence | 40 | 88 | 136 |
| pKL063 (COVID19 SPIKE Protein with 2Xp_GSAS_T4 Trimer Motif_JEVLss(16aa)) | First 16 amino acids have been replaced by JEV long signal sequence | 41 | 89 | 137 |
| pKL064 (COVID19 SPIKE Protein with 2Xp_GSAS_T4 Trimer Motif_JEVLss(18aa)) | First 18 amino acids replaced by JEV long signal sequence | 42 | 90 | 138 |
| pKL065 (COVID19 SPIKE Protein with 2Xp_GSAS_T4 Trimer Motif_mLCKss(16aa)) | First 16 amino acids have been replaced by mouse Light Chain Kappa signal sequence | 43 | 91 | 139 |
| pKL066 (COVID19 SPIKE Protein with 2Xp_GSAS_T4 Trimer Motif_mLCKss(18aa)) | First 18 amino acids replaced by mouse Light Chain Kappa signal sequence | 44 | 92 | 140 |
| pKL067 (COVID19 SPIKE Protein with 2Xp_GSAS_T4 Trimer Motif_SSPss(16aa)) | First 16 amino acids have been replaced by SSP signal sequence | 45 | 93 | 141 |
| pKL068 (COVID19 SPIKE Protein with 2Xp_GSAS_T4 Trimer Motif_SSPss(18aa)) | First 18 amino acids replaced by SSP signal sequence | 46 | 94 | 142 |
| pKL069 (COVID19 SPIKE Protein with 2Xp_GSAS_T4 Trimer Motif_GauLUC(AKP)ss(16aa)) | First 16 amino acids have been replaced by Gaussian Luciferase (AKP) signal sequence | 47 | 95 | 143 |
| pKL070 (COVID19 SPIKE Protein with 2Xp_GSAS_T4 Trimer Motif_ GauLUC(AKP)ss(18aa)) | First 18 amino acids replaced by Gaussian Luciferase (AKP) signal sequence | 48 | 96 | 144 |

[0318] All full length constructs contain proline substitutions K986P and V987P and a “GSAS” (SEQ D NO:190) substitution (residues 682-685) in the furin cleavage site

TABLE 3

Full length SARS-COV2 S protein constructs

| Construct | Signal sequence | ER mutations | SEQ ID NOs Protein DNA RNA | | |
|---|---|---|---|---|---|
| Construct A - pJW019 (COVID19 SPIKE Protein with 2Xp_GSAS_FL_) (also referred to as ‘Spike_FL-2P SAM’ and ‘SARS-CoV-2 spike full length SAM’) | Native | | 49 | 97 | 145 |
| pKL025 (COVID19 SPIKE Protein with 2Xp_GSAS_FL_ER_ret) | Native | mutations K1269A and H1271A | 50 | 98 | 146 |
| pKL026 (COVID19 SPIKE Protein with 2Xp_GSAS_FL_C_term_del) | Native | C-terminal residues 1261-1273 deleted | 51 | 99 | 147 |
| pKL027 (COVID19 SPIKE Protein with 2Xp_GSAS_FL_ GauLUCss(16aa)) | First 16 amino acids have been replaced by Gaussian Luciferase signal sequence | None | 52 | 100 | 148 |
| pKL028 (COVID19 SPIKE Protein with 2Xp_GSAS_FL_ GauLUCss(18aa)) | First 18 amino acids replaced by Gaussian Luciferase signal sequence | None | 53 | 101 | 149 |
| pKL029 (COVID19 SPIKE Protein with 2Xp_GSAS_FL_ CD5ss(16aa)) | First 16 amino acids have been replaced by human CD5 signal sequence | None | 54 | 102 | 150 |
| pKL030 (COVID19 SPIKE Protein with 2Xp_GSAS_FL_ CD5ss(18aa)) | First 18 amino acids replaced by human CD5 signal sequence | None | 55 | 103 | 151 |
| pKL031 (COVID19 SPIKE Protein with 2Xp_GSAS_FL_ CD33ss(16aa)) | First 16 amino acids have been replaced by human CD33 signal sequence | None | 56 | 104 | 152 |
| pKL032 (COVID19 SPIKE Protein with 2Xp_GSAS_FL_ CD33ss(18aa) | First 18 amino acids replaced by human CD33 signal sequence | None | 57 | 105 | 153 |
| pKL033 (COVID19 SPIKE Protein with 2Xp_GSAS_FL_ hIL2ss(16aa)) | First 16 amino acids have been replaced by human Interleukin 2 signal sequence | None | 58 | 106 | 154 |
| pKL034 (COVID19 SPIKE Protein with 2Xp_GSAS_FL_ hIL2ss(18aa)) | First 18 amino acids replaced by human Interleukin 2 signal sequence | None | 59 | 107 | 155 |
| pKL035 (COVID19 SPIKE Protein with 2Xp_GSAS_FL_ hlgEss(16aa)) | First 16 amino acids have been replaced by human IgE signal sequence | None | 60 | 108 | 156 |
| pKL036 (COVID19 SPIKE Protein with 2Xp_GSAS_FL_ hlgEss(18aa)) | First 18 amino acids replaced by human IgE signal sequence | None | 61 | 109 | 157 |
| pKL037 (COVID19 SPIKE Protein with 2Xp_GSAS_FL_ hLCKss(16aa)) | First 16 amino acids have been replaced by human Light Chain Kappa signal sequence | None | 62 | 110 | 158 |
| pKL038 (COVID19 SPIKE Protein with 2Xp_GSAS_FL_ hLCKss(18aa)) | First 18 amino acids replaced by human Light Chain Kappa signal sequence | None | 63 | 111 | 159 |
| pKL039 (COVID19 SPIKE Protein with 2Xp_GSAS_FL_ JEVSss(16aa)) | First 16 amino acids have been replaced by JEV short signal sequence | None | 64 | 112 | 160 |
| pKL040 (COVID19 SPIKE Protein with 2Xp_GSAS_FL_ JEVSss(18aa)) | First 18 amino acids replaced by JEV short signal sequence | None | 65 | 113 | 161 |
| pKL041 (COVID19 SPIKE Protein with 2Xp_GSAS_FL_ JEVLss(16aa)) | First 16 amino acids have been replaced by JEV long signal sequence | None | 66 | 114 | 162 |
| pKL0442 (COVID19 SPIKE Protein with 2Xp_GSAS_FL_ JEVLss(18aa)) | First 18 amino acids replaced by JEV long signal sequence | None | 67 | 115 | 163 |
| pKL043 (COVID19 SPIKE Protein with 2Xp_GSAS_FL_ mLCKss(16aa)) | First 16 amino acids have been replaced by mouse Light Chain Kappa signal sequence | None | 68 | 116 | 164 |
| pKL044 (COVID19 SPIKE Protein with 2Xp_GSAS_FL_ mLCKss(18aa)) | First 18 amino acids replaced by mouse Light Chain Kappa signal sequence | None | 69 | 117 | 165 |
| pKL045 (COVID19 SPIKE Protein with 2Xp_GSAS_FL_ SSPss(16aa)) | First 16 amino acids have been replaced by SSP signal sequence | None | 70 | 118 | 166 |
| pKL046 (COVID19 SPIKE Protein with 2Xp_GSAS_FL_ SSPss(18aa)) | First 18 amino acids replaced by SSP signal sequence | None | 71 | 119 | 167 |
| pKL047 (COVID19 SPIKE Protein with 2Xp_GSAS_FL_ GauLUC(AKP)ss(16aa)) | First 16 amino acids have been replaced by Gaussian Luciferase (AKP) signal sequence | None | 72 | 120 | 168 |
| pKL048 (COVID19 SPIKE Protein with 2Xp_GSAS_FL_ GauLUC(AKP)ss(18aa)) | First 18 amino acids replaced by Gaussian Luciferase (AKP) signal sequence | None | 73 | 121 | 169 |

### Evaluation/Study Design

[0319] The constructs are evaluated in mammalian cells following electroporation of SAM RNA into BHK cells using the following methods:
[0320] a. SAM RNA expression for each of the SAM constructs is tested by using antibodies against dsRNA and flow cytometry.
[0321] b. Antigen expression is determined by flow cytometry, immunoblots and immunofluorescence assays, to investigate protein in cell lysates, on the cell surface and on cell supernatant.
[0322] c. Antigen folding is determined by binding assays to monoclonal antibodies and/or antigen hACE2 receptor.

[0323] Following identification of the most efficient candidate constructs formulation into LNP/CNE based-delivery systems is carried out and testing for antigenicity and immunogenicity is carried out in vivo.

### Example 3. Making SAM DNA for Construct A (pJW019) and Construct B (pJW018)

[0324] The generation of DNA encoding SAM comprising Construct A and DNA encoding SAM comprising Construct B involved cloning SARS CoV-2 spike SAM into pDNA constructs pJW16, pJW17, pJW18, pJW19 and pJW20. See FIG. 1. A DNA encoding a SAM comprising wild-type spike protein was also generated (pJW20).

Inset 2

Sequences related to making Construct A and B

| SEQ ID NO | Description of Sequence | SEQ ID NO | Description of Sequence |
|---|---|---|---|
| 176 | SAM RNA including the construct A (full length modified spike) | 206 | Oligo oMS146 |
| 177 | DNA encoding the SAM RNA including the construct A (full length modified spike) | 207 | Oligo oMS147 |
| 178 | SAM RNA including the construct B (Ecto) | 208 | Oligo oMS148 |
| 179 | DNA encoding the SAM RNA including the construct B (Ecto) | 209 | Oligo oMS149 |
| 180 | QHD43416.1 | 210 | Oligo oMS150 |
| 181 | Oligo oJW57 | 211 | Oligo oMS151 |
| 182 | Oligo oJW58 | 212 | Oligo oMS152 |
| 183 | Oligo oJW55 | 213 | Oligo oMS153 |
| 184 | Oligo oJW56 | 214 | Oligo oMS154 |
| 185 | Oligo oJW49 | 215 | Oligo oMS155 |
| 186 | Oligo oJW50 | 216 | Oligo oMS156 |
| 187 | Oligo oJW51 | 217 | Oligo oMS157 |
| 188 | RRAR Amino Acid | 218 | Oligo oMS158 |
| 189 | RRAR Nucleic Acid | 219 | Oligo oMS159 |
| 190 | GSAS Amino Acid | 220 | Oligo oMS160 |
| 191 | GSAS Nucleic Acid | 221 | Oligo oMS161 |
| 192 | Oligo oJW52 | 222 | pJW19_Spike_FL-2P SAM Antigen Nucleotide (Start codon to stop codon): |
| 193 | oJW52 portion Amino Acid | 223 | pJW19_Spike_FL-2P SAM Antigen Protein (Start codon to stop codon) |
| 194 | oJW52 portion Nucleic Acid | 224 | pJW19_Spike_FL-2P SAM SAM (5′UTR-through-PolyA Tail Nucleotide) |
| 195 | oJW52 mutation Amino Acid | 225 | Oligo oJL471 |
| 196 | oJW52 mutation Nucleic Acid | 226 | Oligo oJL472 |
| 197 | Oligo oJW59 | 227 | Oligo oJL473 |
| 198 | Oligo oJW53 | 228 | Oligo oJL474 |
| 199 | Oligo oJW41 | 229 | Oligo oJL475 |
| 200 | Oligo oJW54 | 230 | Oligo oJL23 |
| 201 | Oligo oJL112 | | |
| 202 | Oligo oMS142 | | |
| 203 | Oligo oMS143 | | |
| 204 | Oligo oMS144 | | |
| 205 | Oligo oMS145 | | |

[0325] Q5 polymerase site-directed mutagenesis PCR was used to remove two BspQ1 restriction sites from the open reading frame of SARS CoV-2 spike sequence present in pJL-0267 (a pCMV expression plasmid). The resulting pDNA was pJW16.

[0326] In this regard, Q5 PCR was performed on pJL-0267 using the oligos oJW57 (SEQ ID NO:180) and oJW58 (SEQ ID NO:181) according to the manufacturer protocols. The Q5 PCR product was treated with KLD enzyme mix as per the manufacturers protocol and samples were transformed into NEB 10-Beta chemically competent cells as per the manufacturers protocol. Bacterial transformations were grown on 2X YT agarose media plates containing 100 ug/ml carbenicillin at 37° C. overnight for 18 hrs. Putative positive clone colonies were inoculated in 2X YT liquid media containing 100 ug/ml carbenicillin at 37° C. overnight for 18 hrs. and were miniprepped the next day. Q5 PCR was performed on several of the putative clones using the oligos oJW55 (SEQ ID NO:183) and 56 (SEQ ID NO:184) according to the manufacturer protocol. The Q5 PCR product was treated with KLD enzyme mix as per the manufacturers protocol and samples were transformed into NEB 10-Beta chemically competent cells as per the manufacturer protocol. Bacterial transformations were grown on 2X YT agarose media plates containing 100 ug/ml carbenicillin at 37° C. overnight for 18 hrs. Putative positive clone colonies were inoculated in 2X YT liquid media containing 100 ug/ml carbenicillin at 37° C. overnight for 18 hrs. and were miniprepped the next day.

[0327] Putative clones with the two BspQ1 restriction sites removed from the spike open reading frame in the pCMV expression plasmid (pJW16) were then amplified by PCR producing a linear product to be used in a HIFI DNA assembly reaction to insert gBlocks (double-stranded gene fragments) containing sequence to mutate the furin cleavage site between S1 and S2 (furin cleavage products of substrate S0 molecule), and to insert two prolines into S2 near the fusion peptide, thereby creating a spike sequence that would produce a prefusion stabilized version of the protein. These reactions would create the pJW17 plasmid.

[0328] In this regard, Q5 PCR was performed on the pJW16-1 (antigen sequence verified using oJL23 (SEQ ID NO: 230), oJL471-475 (SEQ ID NOs: 225-229)) clone using the oligos oJW49 (SEQ ID NO:185) and oJW50 (SEQ ID NO:186) according to the manufacturer protocols. The linear PCR produce was treated with DPN1 as per the manufacturers protocol and the reaction was purified with an Gel extraction/ PCR clean up kit combo as per the manufacturer’s protocol. The purified linear product was run in a HIFI DNA assembly reaction with gBlocks oJW51 ((SEQ ID NO:187) and Furin RRAR (SEQ ID NO:188) sequence (AGGCGAGCCAGG) (SEQ ID NO: 189) in oJW51 was modified to GSAS (SEQ ID NO: 190) (GGCTCCGCCTCC) (SEQ ID NO: 191). 2X Proline mutation was created in oJW52 by altering RLDKVEAE (SEQ ID NO: 193) (CGATTGGATAAGGTCGAAGCCGAG) (SEQ ID NO: 194) to RLDPPEAE (SEQ ID NO: 195) (CGATTGGATCCCCCCGAAGCCGAG) (SEQ ID NO: 196). HIFI samples were transformed into NEB 10-Beta chemically competent cells as per the manufactures protocol. Bacterial transformations were grown on 2X YT agarose media plates containing 100 ug/ml carbenicillin at 37° C. overnight for 18 hrs. Putative positive clone colonies were inoculated in 2X YT liquid media containing 100 ug/ml carbenicillin at 37° C. overnight for 18 hrs. and were miniprepped the next day. Putative clones containing the prefusion stabilizing mutations in the spike protein within the pCMV expression plasmid (pJW17) were sent for sequencing with oJL23, oJL471-475.

[0329] The desired SAM pDNA vectors were cloned by performing HIFI DNA assembly reactions between PCR amplicons derived from the full-length native (pJW16) or the full-length prefusion stabilized (pJW17) sequences and the linear SAM pDNA vector. These reactions would create pJW20 and pJW19, respectively. Additionally, a third amplicon from pJW17, lacking the sequence encoding the trans-membrane domain of the spike, was assembled into the linear SAM pDNA with a gBlock encoding for the T4 fibritin trimerization motif in place of the trans-membrane domain, thereby creating the Ecto domain construct (pJW18).

[0330] In this regard, the pJL-0209 SAM cloning vector was linearized with Scal restriction enzyme and the linear product was treated with NEB Quick CIP as per the manufacturer’s protocol. PCR amplicons were generated from pJW17 using primer pairs oJW59 (SEQ ID NO: 197)/53(SEQ ID NO: 198) and oJW59/41 (SEQ ID NO: 199). A PCR amplicon was generated from pJW16 using the primer pair oJW59/41. The amplicons were then purified using a Gel Extraction and PCR Purification Combo Kit, and size-verified on a DNA E-gel. The PCR amplicons from pJW17 using primer pairs oJW59/53 was processed in a HIFI DNA assembly reaction with the gBlock oJW54 (SEQ ID NO: 200) and the linear pJL-0209 SAM vector producing putative pJW18 Spike Ecto clones, while the pJW16 and pJW17 oJW59/41 amplicons were processed in a HIFI DNA assembly reaction with the linear vector alone (producing pJW20 Spike Full-length native, and pJW19 Spike Full-length Wrapp mutation stabilized SAM clones, respectively). The T4 Trimerization motif was based on Wrapp et al., 2020 amino acid sequence. The nucleotide sequence from T4 genome (NC_000866.4) was used. The first of the two highlighted Leucine residues below was changed from an F amino acid in the T4 genome sequence (TTC to CTT) to match the published sequence. The trimerization motif is followed directly by a double stop codon. HIFI samples were transformed into NEB 10-Beta chemically competent cells as per the manufactures protocol. Bacterial transformations were grown on 2X YT agarose media plates containing 30 ug/ml kanamycin at 37° C. overnight for 18 hrs. Putative positive clone colonies were inoculated in 2X YT liquid media containing 50 ug/ml kanamycin at 37° C. overnight for 18 hrs and were miniprepped the next day. Putative clones for pJW18, 19, and 20 were verified by a diagnostic digest with Apa1 and Pmel which enables to drop the insert out of the vector backbone, by BspQ1 digestion to confirm only one site and vector linearization, and by sequence analysis of the pDNA maxi preps to verify the antigen, the nsPs, and the untranslated regions of the replicons (FIG. 3). Primers oJL112 ((SEQ ID NO: 201), oJW55, oJW56, and oMS142-161 (SEQ ID NOs: 202-221) were used for sequence analysis.

[0331] pDNA in situ maps illustrating the SARS CoV-2 Spike replicon plasmid DNA template sequences, pertinent mutations, and regulatory elements are shown

[0332] FIG. 2A Spike_ECTO-2P SAM replicon with furin cleavage site mutation and 2X proline mutation, pJW18; FIG. 2B Spike_WT SAM replicon (pJW20). FIG. 2C Spike_FL-2P SAM (pJW19). pJW19_Spike_FL-2P SAM antigen nucleotide (Start codon to stop codon): (SEQ ID NOs: 222); pJW19_ Spike_FL-2P SAM antigen protein (Start codon to stop codon): (SEQ ID NOs: 223); pJW19_ Spike_FL-2P SAM SAM (5′UTR-through-PolyA Tail Nucleotide) (SEQ ID NOs: 223).

### Example 4: In Vitro Synthesis of SAM RNA Having Construct A and SAM RNA Having Construct B

[0333] SAM RNA comprising Construct A and SAM RNA comprising Construct B were made from pJW019 and pJW018, respectively. SAM RNA comprising a construct encoding wildtype spike protein was made from pJW020.

[0334] Synthetic RNAs were generated by in vitro transcription reactions on linearized plasmid DNA, followed by a Vaccinia capping enzyme reaction to add a 7-methylguanylate cap structure (Cap 0) to the 5′ end of RNAs. Plasmid DNAs (150 µg each) were linearized by incubation with 1x NEB buffer 3.1 and 250 units BspQI restriction enzyme at 50° C. for 2 hours. Linearized DNA templates were purified by mixing with equal volume of phenol/chloroform followed by centrifugation. The aqueous phase was added to clean eppendorf tube and ⅒ volume of 3 M sodium acetate was added to each tube and 2x volume of 100% ethanol. Samples were chilled on ice for 20 minutes, and centrifuged for 30 minutes at 12,000 rpm. Supernatant was removed.

[0335] Pellets were washed with 70% ethanol by centrifugation for 5 minutes followed by removal of supernatant. Dried pellets were resuspended in nuclease free water to the final DNA concentration of approximately 0.75 µg/µl. T7 polymerase was used for in vitro synthesis of the RNA in the presence of Tris-HCL, MgCl, DTT, spermidine, pyrophosphatase, RNAse Inhibitor, and ribonucleotides, per protocol. Reactions were incubated for 2 hours at 30° C.

[0336] Following the T7 reaction, the vaccinia capping reaction was initiated by adding Tris_HCL, KCL, GTP, SAM, DTT, Turbo DNAse, RNASE Inhibitor and Vaccinia Capping Enzyme according to protocol. 6000 µl of 7.5 M LiCl was added to each reaction and incubated at -20° C. for 30 minutes. RNA was precipitated by centrifugation at 4200 rpm for 30 minutes at 4° C. Supernatant was removed and pellets were washed by adding 5 ml 70% ethanol and centrifugation for 5 minutes 4200 rpm at 4° C.

[0337] The pellet was air dried and RNA was dissolved in an approximately 7 ml volume of nuclease-free water. RNA concentration was measured by using a NanoDrop spectrophotometer (Table 4). FIG. 4. illustrates SAM CoV-2 Spike vectors digested with BspQI restriction enzyme prior to IVT. Vector bands were compared to NEB 1 Kb Extend DNA ladder (Ladder).

TABLE 4

Concentration, volume, and total amount of IVT RNA produced for three SARS CoV-2 S replicons

| | Concentration | Total volume | Total RNA |
|---|---|---|---|
| SAM ID | µg/ml | (ml) | (mg) |
| JW18 | 1.71 | 7.00 | 11.90 |
| JW19 | 1.72 | 7.00 | 12.05 |
| JW20 | 1.58 | 7.00 | 11.10 |

### Example 5. Analysis of SAM RNA Having Construct A and SAM RNA Having Construct B by Denaturing Agarose Gel Electrophoresis

[0338] Synthetic RNAs were visualized by agarose gel electrophoresis and quantitated as follows. 600 ng of RNA samples and control RNA Rabies G SAM (RG.co2 SAM Reference STD) and 1000 ng RNA ladder (1000 ng) were added to tubes, with enough RNASE free water to equal 10 ul. 10 µl of 1x NorthernMax®-Gly sample loading dye was added to each tube. Samples were denatured at 50° C. for 20 minutes and electrophoresed on 1% agarose gel in NorthernMax-Gly Gel buffer for 30 minutes at 100 V (5 V per cm distance between anode and cathode). The gel was imaged by BIO_RAD ChemiDoc MP Imaging System (FIG. 5).

### Example 6. In Vitro RNA Expression and Antigen Expression by Western Blot of of SAM RNA Having Construct A and SAM RNA Having Construct B in BHK Cells

### Day 0:

[0339] BHK cells were plated 1e⁷/ flask in 4X T225 flasks in Growth Media and incubated at 37° C., 5% CO2 for ~20 hours.

### Day 1:

[0340] 2 ml DMEM + 1% FBS + P/S (outgrowth media) were added to each well of 9×6 well and kept warm in 37° C. incubator. Electroporator was prepared: 120 V, 25 ms pulse, 0.0 pulse interval, 1 pulse, 2 mm cuvette. Cuvettes were labeled on ice. Cells in growth phase were used, harvested into 5% media (growth) and counted using Countess Cell Counter. 1e⁶ cells per electroporation were used. Each sample were ran in duplicate.

[0341] Cells were centrifuged at 1500 rpm (462 × g) for 5 mins and media aspirated. Cells were washed 1× with 20 ml cold Opti-MEM media. Cells were centrifuged at 1500 rpm (462 × g) for 5 mins and media aspirated. The cells were resuspended in Opti-MEM media to 0.25 ml × # of electroporations.

[0342] RNA was prepared to a total of 4.2 ug per electroporation. (i.e. 0.1 ug RNA + 4.1 µg Mouse Thymus RNA). For replicates, Master Mix was prepared with both RNAs (for example, for triplicate, prepare 0.3 µg RNA + 12.3 ug MT RNA).

TABLE 5

Reaction

| Construct | Fold RXN | Concentration Construct µg/µl | 100 ng RNA (µl) | Thymus for 100 ng (µl) | 1000 ng RNA (µl) | Thymus for 1000 ng (µl) |
|---|---|---|---|---|---|---|
| A848 | 5x | 1.25 | 0.40 | 50.5 | 4.01 | 16 |
| pJW18-4 | 5x | 1.71 | 0.29 | 20.5 | 2.93 | 16 |
| pJW19-4 | 5x | 1.72 | 0.29 | 20.5 | 2.90 | 16 |
| pJW20-2 | 5x | 1.59 | 0.32 | 20.5 | 3.15 | 16 |
| Thymus Negative | 5x | 1 | xxx | 21 | xxx | 21 |
| | | | Total MT = | 103 | | 85 |

[0343] 250 µl cells were added into the tube containing the RNA mix and mixed gently 4-5 times. (For replicates, added 250 µl cells/replicate (for example, for 5X, add 1,250 µl cells)). Transferred cells and RNA mixture were added to 2 mm cuvette and proceeded to electroporation. For negative control, 250 µl cells was added to a cuvette (only mouse thymus RNA) and proceeded to electroporation. Electroporated was performed with one pulse. Cells were allowed to rest at room temperature for 10 mins. Cells from cuvettes were added to 6 well dishes...1X EP/ well and incubated at 37° C., 5% CO2 overnight. Added BFA to half of samples (Used Golgi-Plug from BD, 555029) \made 40X BFA in media and aliquoted 50 µl onto cells/ 80 µl stock BFA into 2 mls 1%FBS- DMEM.

### Day 2:

[0344] Supernatants:
[0345] Collected 2X supernatants (2 ml each) for each construct/ treatment.
[0346] Clarifying spin- 1500 RPM, 5 min, 4° C.
[0347] Placed supernatant into new tubes.
[0348] Placed supernatants at -80° C.

[0349] After supernatant removal, cells were placed in PBS and moved to flow processing. ½ of a 6 cm dish of cells was processed to generate lysates. Cells were spun down 1500 RPM, 5 min out of cell dissociation buffer and resuspended in 100 µl cold RIPA +PI. Incubated on ICE 30 min. Spin 10 min full speed to remove nuclei, place lysates in new tube at -80° C.

### FLOW Analysis

[0350] Protocol for flow cytometry (6-well) are as follows: Medium was collected and cell monolayer was washed with 2 ml PBS/6-well. PBS was removed and 500 µl cell dissociation buffer enzyme-free/6-well was added and incubate at 37° C. for 10 min. Pipetted multiple times to separate cells and transfer 200 µl cell suspension to an Eppendorf tube. 250 Cell suspension was transferred to 96-well U-bottom plate and spun 1200 rpm for 5 min/ Buffer was discarded. 150 µl Fix/Perm buffer was added, cells were resuspended and incubated at 4° C. for 20 min. Cells were Spun 1200 rpm for 5 min and the buffer discarded. Cells were resuspended with 150 µl Perm buffer. This is the master stock of cells. For each antibody (Ab) staining, 30 µl cells were transferred from the master stock to a new 96-well U-bottom plate. Spin 1200 rpm 5 min, and buffer discarded.

[0351] J2 staining: 0.75 µl J2 mAb was mixed with 0.75 µl Zenon APC labeling reagent per sample to be treated and incubate at RT for 5 min. 0.75 µl Zenon blocking reagent mouse IgG was added per sample to be treated and incubated at RT for 5 min. Diluted J2-APC complex with 50 µl Perm buffer per well. 50 µl diluted J2-APC complex was added to the 30 µl cells that were transferred from the master stock to a new 96-well U-bottom plate and incubated at RT for 30 min. The same was spun 1200 rpm for 5 min and buffer discard. The sample was washed with 150 µl Perm buffer, spun 1200 rpm for 5 min and the buffer discard. Cells were resuspended in 150 µl PBS-0.25% BFA and transferred to J2 flow cytometry.

[0352] All other Ab staining: Primary Ab was diluted by 1:1000 with Perm buffer. 50 µl diluted primary Ab was added to cells in the 96-well U-bottom plate and incubated at RT for 1 h, and spun 1200 rpm for 5 min and the buffer was discarded. Cells were washed with 150 µl Perm buffer, spun 1200 rpm for 5 min and discard buffer. While washing cells in the previous step, secondary Ab was diluted by 1:1000 with Perm buffer. 50 µl 1:1000 diluted secondary Ab were added to the cells and incubated at RT for 1 h. Spin 1200 rpm for 5 min and discarded buffer. Cells were washed with 150 µl Perm buffer, spun 1200 rpm for 5 min and buffer discarded. Cells were resuspended in 150 µl PBS-0.25% BFA and transfer to flow cytometry.

[0353] The data suggest that all three spike encoding replicons were potent in BHK cells (FIG. 6A, FIG. 6B, FIG. 6C, FIG. 6D).

### Day 3:

### SDS-PAGE/ Western: Lysates

[0354] For analysis, the following was prepared: lysate sample + sample running buffer (10 µl sample (~5% total 6 cm lysate) + 3.5 µl 4X running buffer + 1.5 µl DTT to 50 mM DTT final (4X LDS sample buffer, Invitrogen, NP0007 /// Licor Chameleon DUO ladder, 928-60000).

[0355] Samples were incubated at 95° C., 5 min. Standards (8 µl Licor ladder) and samples + sample running buffer were loaded onto 4-12% gel (1.5 mm 10 well, Novex NP0335BOX) and ran for ~50 minutes at 200 V constant in 1X MOPS. Gels were transferred to iBlot 2 Gel Transfer device and transferred to nitrocellulose membrane. Program P0 was ran and adjust stage 3 to 5 min for a total of a ten min transfer. Blocking was performed in 10 ml Oddessy Blocking buffer at RT for 1 hr. while rocking. Primary antibodies were added in Licor Odyssey blocking buffer (927-40000), 0.05% tween and appropriate actin antibody was mixed with effector antibodies and incubated over night at 4° C.
[0356] Primary spike antibodies: GTX13560 (SARS-CoV-2 spike antibody, GeneTex), GTX135356 (SARS-CoV-2 spike antibody, GeneTex), GTX632604 (SARS-CoV-2 spike antibody, GeneTex), ProSci4223
[0357] Primary Actin antibodies: Mouse anti-Actin Millipore Sigma MAB1501 (Mouse anti-Actin) 1:1000; Rabbit anti-beta-Actin Millipore Sigma MABT523 (Rabbit anti-beta-Actin) 1:1000

### Day 4:

[0358] Blots were washed 3X with 1X PBST (0.2% Tween, Ph 7.4), 5 min each and secondary Licor antibodies added for 1 hr. RT.

TABLE 6

Antibodies

| Target | Used at |
|---|---|
| Goat anti-Mouse 680RD | 1:15,000 |
| Goat anti-Rabbit 800CW | 1:15,000 |
| Goat anti-Mouse 800CW | 1:15,000 |
| Goat anti-Rabbit 680RD | 1:15,000 |

[0359] Blots were washed 3× 10 min each, 1× 5 min wash PBS only and processed on Licor.

### SDS-PAGE/ Western: Supernatant

[0360] 10X concentrated supernatant was prepared with Amicon ultra-0.5 10 K (Millipore Sigma, UFC501096) devices, two for each sample. Devices were pre-rinsed with DMEM (No FBS) and 500 µl was place into the device for each sample, spun at 14,000 g for 20 min at 4° C.

[0361] Specified supernatant samples were loaded into rinsed columns (500 µl) and spun 20 min. To elute, the columns were flip over into new tube and spun 2 min, 1000x g, 4° C. This resulted in ~100 µl from 1 ml of supernatant once resulting material from two devices were combined.

[0362] 25 µl of 10X concentrated supernatant were ran on gels with sample buffer and DTT as above. Gels were ran as above and probed supernatant blot with antibody, as above.

[0363] FIG. 7A and FIG. 7B illustrates western blot analysis of SARS CoV-2 Spike SAM RNA replicons from BHK cells. FIG. 7A, 5% of a lysate from a 1 µg RNA electroporation into 1 million BHK cells or FIG. 7B, 25 µl of 10X concentrated supernatant was run per well of an 4-12% SDS-PAGE gel and transferred to a nitrocellulose membrane. The spike protein was probed with the same monoclonal mouse Genetex S2 antibody used for flow cytometry and visualized with a secondary Licor near-infrared antibody. Actin was probed as a loading control. Recombinant S protein (rec protein) was run as an antibody specificity control. S0 is uncleaved spike protein, and KDa= Kilodalton.

### Example 7: In Vitro Surface Expression and hACE2 Binding of Upon SAM Electroporation of BHK Cells With SAM RNA Having Construct A and SAM RNA Having Construct B

[0364] BHK cells were electroporated with 1.0 µg IVT SAM SARS CoV-2 replicons RNA. BFA was added to cells four hours after electroporation and seeding. The cells were processed three different ways at 18 hours post-transfection:

### Day 0

[0365] BHK cells were plated 1e⁷/ flask in 4X T225 flasks in Growth Media and incubated at 37° C., 5% CO2 for ~20 hrs.

### Day 1

[0366] Plates were prepared as follows: 2 ml DMEM + 1% FBS + P/S (outgrowth media) were added to each well of 9×6 well and kept warm in 37° C. incubator. Electroporator was prepared: 120 V, 25 ms pulse, 0.0 pulse interval, 1 pulse, 2 mm cuvette. Cuvettes were labeled and kept on ice.

[0367] Cells in growth phase were used. Cells were harvest into 5% media (growth) and count using Countess Cell Counter (Invitrogen). About 1e⁶ cells were used per electroporation. Each sample was run in duplicate. # RNA samples x # replicates= total # of electroporations.

[0368] Cells were centrifuged at 1500 rpm (462x g) for 5 mins and the media aspirated. Cells were washed 1X with 20 ml cold Opti-MEM media and centrifuged at 1500 rpm (462x g) for 5 mins. The media was thereafter aspirated. Cells were resuspended in Opti-MEM media to 0.25 ml x # of electroporations. RNA was prepared to a total of 4.2 µg per electroporation. (for example, 0.1 µg RNA + 4.1 µg Mouse Thymus RNA). For replicates, Master Mix was prepared with both RNAs (for example, for triplicate, prepare 0.3 µg RNA + 12.3 µg MT RNA)

TABLE 7

Reaction

| Construct | Fold RXN | Concentration Construct µg/µl | 1000 ng RNA (µl) | Thymus for 1000 ng (µl) |
|---|---|---|---|---|
| mScarlet | 7x | 1.15 | 6.09 | 24.4 |
| pJW18-4 | 7x | 1.71 | 4.10 | 24.4 |
| pJW19-4 | 7x | 1.72 | 4.07 | 24.4 |
| pJW20-2 | 7x | 1.59 | 4.41 | 24.4 |
| Thymus Negative | 7x | 1 | Xxx | 29.4 |
| | | | | 127 |

[0369] 250 µl cells were added into the tube containing the RNA mix and pipetted gently 4-5 times. For replicates, 250 µl cells/replicate (for example, for 5X, add 1,250 µl cells). Transferred cells and RNA mixture were placed in a 2 mm cuvette and electroporated as above, one pulse. For negative control, 250 µl cells were added to a cuvette (only mouse thymus RNA) and electroporated as above, one pulse.

[0370] Cells were allowed to rest at room temperature for 10 mins. Cells from cuvette were added to 6 well dishes...1X EP/ well and incubated at 37° C., 5% CO2 overnight (18 hours). BFA was added to half of samples (Used Golgi-Plug from BD, 555029) \made 40X BFA in media and aliquoted 50 µl onto cells/ 80 µl stock BFA into 2 mls 1%FBS-DMEM.

### Day 3

[0371] Samples were collected for flow processing. Processing included Total cell stain (Fixed and Permeabilized), surface stain, and hACE2 binding detection by flow.

[0372] FLOW Analysis - Protocol for preparing live cells for flow cytometry from 6-well plate

[0373] Plates were generated, medium was removed and washed cell monolayer with 2 ml PBS/well. PBS was removed and 500 µl cell dissociation buffer enzyme-free/well was added and incubated at 37° C. for at least 10 min. Cells were pipetted multiple times to separate cells. 150 µl cells were transferred to 96-well U-bottom plate and kept on ice. Three plates were made for the following assays:
[0374] Whole cell staining (Fix/Perm’d; detects both surface and intracellular S protein) with mouse anti-S mAb
[0375] Surface staining (live cells) with primary-secondary Ab protocol
[0376] hACE2 binding assay (live cells) with primary-secondary Ab protocol

### Whole Cell Staining (Fix/Permeabilized)

[0377] Live cells were spun at 1200 rpm for 5 min, and the buffer discarded. 100 µl Fix/Perm buffer was added, and cells resuspended and incubate at 4° C. for 20 min. Cells were spun at 1200 rpm for 5 min and buffer discarded. Cells were resuspend with 150 µl Perm buffer, spun 1200 rpm for 5 min and buffer discarded.

[0378] Mouse anti-S mAb - Mouse anti-S mAb was diluted 1:1000 with Perm buffer. 50 µl 1:1000 diluted mouse anti-S mAb were added to the cells, incubated at RT for 1 h and spun 1200 rpm for 5 min, buffer discard. Cells were washed with 150 µl Perm buffer, spun 1200 rpm for 5 min, and buffer discarded.

[0379] Goat anti-mouse IgG - Goat anti-mouse IgG Alexa 488 was diluted 1:1000 with Perm buffer. 50 µl 1:1000 diluted goat anti-mouse IgG Alexa 488 were added to cells, incubated at RT for 1 h, spun 1200 rpm for 5 min and buffer discarded. Cells were washed with 150 µl Perm buffer, spun 1200 rpm for 5 min, and buffer discarded. Cells were resuspended cells in 150 µl PBS-0.25% BFA and transfer to flow cytometry.

### Surface Staining (Live Cells) With Primary-Secondary Ab Protocol

[0380] Mouse anti-S mAb was diluted 1: 1000 with PBS-2.5% FBS. Live cells were spun at 1200 rpm for 5 min and buffer discarded. 50 µl 1:1000 diluted mouse anti-S mAb was added to the cells and incubate on ice for 30 min, spun 1200 rpm 5 min and buffer discarded. Cells were washed with 150 µl PBS-2.5% FBS, spun 1200 rpm for 5 min, and buffer discarded.

[0381] Goat anti-mouse IgG-Goat anti-mouse IgG Alexa 488 was diluted 1:1000 with PBS-2.5% FBS. 50 µl 1:1000 diluted goat anti-mouse IgG Alexa 488 was added to cells, incubate on ice for 30 min, spun 1200 rpm for 5 min and buffer discarded. Cells were washed with 150 µl PBS-2.5% FBS, spun 1200 rpm for 5 min, and buffer discarded. Cells were fixed with 100 µl 1.5% PFA, incubated on ice for 20 min, spun 1200 rpm for 5 min and buffer discarded. Cells were resuspended in 150 µl PBS-0.25% BFA and transferred to flow cytometry.

### hACE2 Binding Assay (Live Cells) With Primary-Secondary Ab Protocol

[0382] hACE2 protein (0.31 mg/ml stock) was diluted 1:150 with PBS-2.5% FBS. Live cells were spun at 1200 rpm for 5 min and buffer discarded. 50 µl diluted hACE2 protein was added and incubated on ice for 30 min, spun 1200 rpm 5 min, and buffer discarded. Cells were washed with 150 µl PBS-2.5% FBS, spun 1200 rpm for 5 min and buffer discarded.

[0383] Goat anti-hACE2 pAb were diluted 1:200 with PBS-2.5% FBS. 50 µl 1:200 diluted goat anti-hACE2 pAb were added to cells, incubated on ice for 30 min, spun 1200 rpm for 5 min, and buffer discarded. Cell were washed, with 150 µl PBS-2.5% FBS, spun 1200 rpm for 5 min and buffer discarded.

[0384] Rabbit anti-goat IgG Alexa 488 were diluted 1:1000 with PBS-2.5% FBS. 50 µl 1:1000 diluted rabbit anti-goat IgG Alexa 488 were added to the cells, incubated on ice for 30 min, spun 1200 rpm for 5 min, and buffer discarded. Cells were washed with 150 µl PBS-2.5% FBS, spun 1200 rpm for 5 min and buffer discarded. Cells were fixed with 100 µl 1.5% PFA, incubated on ice for 20 min. Spin 1200 rpm for 5 min, and buffer discarded. Cells were resuspended in 150 µl PBS-0.25% BSA and transfer to flow cytometry.

### Results: In Vitro Surface Expression and hACE2 Binding of SARS CoV-2 Spike Expressed After SAM RNA Replicons Transfection in BHK Cells by Flow Cytometry

[0385] The SAM SARS CoV-2 RNA replicons were transfected into cells with an efficiency (evaluated as percentage of antigen positive cells via anti-dsRNA antibody staining) comparable to the one of a control SAM mScarlet replicon (FIG. 8A). Treatment with BFA resulted in virtually no spike protein or hACE2 on the surface of the cells when BFA was present (FIG. 8B, FIG. 8C). In the absence of BFA the Spike_ECTO-2P SAM expressed protein was not present on the surface of cells. Both Spike_FL-2P SAM (pJW019) and Spike_WT SAM (pJW020) expressed proteins were present on the surface of cells in the absence of BFA treatment. There was slightly more Spike_FL-2P SAM expressed protein on the surface of cells when compared to the Spike_WT SAM expressed protein, and a correlated increase in the hACE2 receptor bound to the surface of cells in the presence of the Spike_FL-2P SAM expressed protein (from pJW019). This phenotype was corroborated by the MFI values of the spike and hACE2 protein on the surface of the cells in the presence of the Spike_FL-2P SAM replicon, which were also slightly higher (FIG. 8D, FIG. 8E, FIG. 8F).

### Example 8: In Vitro RNA Expression, Surface Expression, hACE2 Binding, and Antigen Expression by Western Blot of Muscle Cells Electroporated With SAM RNA Having Construct A and SAM RNA Having Construct B

[0386] To corroborate the BHK cell data in a muscle cell line, mouse muscle C2C12 cells were electroporated with 1.0 µg IVT SAM SARS CoV-2 replicon RNAs. BFA was added to cells four hours after electroporation and seeding. The cells were processed in four different ways at 18 hours post-transfection:

### Day 0

[0387] muscle cells were plated 1e7/ flask in 6X T225 flasks in Growth Media and incubated at 37° C., 5% CO2 for ~20 hours.

### Day 1

[0388] Prepared plates: 2 ml DMEM + 1% FBS + P/S (outgrowth media) were added to each well of 9× 6 well and kept warm in 37° C. incubator. Prepared electroporator: 120 V, 25 ms pulse, 0.0 pulse interval, 1 pulse, 2 mm cuvette. Cuvettes were labeled and kept on ice.

[0389] Cells in growth phase were harvested into 5% media (growth) and counted using Countess Cell Counter. ~1e⁶ cells per electroporation were use. Each sample was run in duplicate. # RNA samples x # replicates= total # of electroporations. Cells were centrifuged at 1500 rpm (462x g) for 5 mins and media aspirated.

[0390] Cells were washed 1X with 20 ml cold Opti-MEM media and centrifuged at 1500 rpm (462x g) for 5 mins. Media was aspirate. Cells were resuspended in Opti-MEM media to 0.25 ml x # of electroporations. RNA was prepare to a total of 4.2 ug per electroporation. (i.e. 0.1 µg RNA + 4.1 µg Mouse Thymus RNA).

[0391] For replicates, Master Mix was prepared with both RNAs (for example for triplicate, prepare 0.3 ug RNA + 12.3 µg MT RNA).

TABLE 8

Reaction

| Construct | Fold RXN | Concentration Construct µg/µl | 1000 ng RNA (µl) | Thymus for 1000 ng (µl) |
|---|---|---|---|---|
| mScarlet (JL-194) | 7x | 1.15 | 6.09 | 24.4 |
| GFP (A848) | 7x | 1.25 | 5.62 | 24.4 |
| pJW18-4 | 7x | 1.71 | 4.10 | 24.4 |
| pJW19-4 | 7x | 1.72 | 4.07 | 24.4 |
| pJW20-2 | 7x | 1.59 | 4.41 | 24.4 |
| Thymus Negative | 7x | 1 | Xxx | 29.4 |
| | | | | 151.4 |

[0392] 250 µl cells were added into the tube containing the RNA mix and pipetted gently 4-5 times. For replicates, 250 µl cells/replicate was added (for example, for 5X, add 1,250 µl cells). Cells and RNA mixture were transferred to 2 mm cuvette and electroporated as noted above, one pulse. For negative control, 250 µl cells were added to a cuvette add (only mouse thymus RNA) and electroporated as above, one pulse. Cells were allowed to rest at room temperature for 10 mins and added from cuvettes to 6 well dishes...1X EP/ well. Cells were incubated at 37° C., 5% CO2 overnight ~18 hours. hpt: Added BFA to half of samples (Used Golgi-Plug from BD, 555029) \made 40X BFA in media and aliquoted 50 µl onto cells/ 80 µl stock BFA into 2 mls 1%FBS- DMEM.

### Day 2

[0393] Processing included Total cell stain (Fixed and Permeabilized), surface stain, and hACE2 binding detection by flow.

### FLOW Analysis - Protocol for Preparing Live Cells for Flow Cytometry From 6-Well Plate

[0394] Medium was collected and cell monolayer washed with 2 ml PBS/well. PBS was removed and 500 µl cell dissociation buffer enzyme-free/well was added. The cells were incubated at 37° C. for at least 30 min. Cells were pipetted multiple times to separate cells, 160 µl cell suspension were transferred to an Eppendorf tube and transferred to western blot.

[0395] For each assay, 80 µl cells were transferred to 96-well U-bottom plate and keep on ice. 4 plates were made for the following assays:
[0396] J2 (dsRNA) staining (Fix/Perm’d)
[0397] Whole cell staining (Fix/Perm’d; detects both surface and intracellular S protein) with mouse anti-S mAb
[0398] Surface staining (live cells) with primary-secondary Ab protocol
[0399] ACE2 binding assay (live cells) with primary-secondary Ab protocol

### J2 (dsRNA) Staining (Fix/Permeabilized)

[0400] Live cells were spun at 1200 rpm for 5 min and buffer discarded. 100 µl Fix/Perm buffer was added, cells were resuspend and incubate at 4° C. for 20 min, spun 1200 rpm for 5 min and buffer discarded. Cells were resuspended with 150 µl Perm buffer, spun 1200 rpm for 5 min and buffer discarded. 0.75 µl J2 mAb were mixed with 0.75 µl Zenon APC labeling reagent per each sample to be stained and incubated at RT for 5 min. 0.75 µl Zenon blocking reagent mouse IgG were added per each sample to be stained, and incubated at RT for 5 min. J2-APC complex were diluted with 50 µl Perm buffer per each sample to be stained.

[0401] 50 µl diluted J2-APC complex were added to cells and incubate at RT for 30 min, spun 1200 rpm for 5 min and buffer discarded. Cells were washed with 150 µl Perm buffer, spun 1200 rpm for 5 min, and buffer discarded. Cells were resuspended in 150 µl PBS-0.25% BSA and transfer to flow cytometry.

### Whole Cell Staining (Fix/Permeabilized)

[0402] Live cells were spun at 1200 rpm for 5 min and buffer discarded. 100 µl Fix/Perm buffer was added, cells were resuspended and incubate at 4° C. for 20 min, spun 1200 rpm for 5 min and buffer discarded. Cells were resuspended with 150 µl Perm buffer, spun 1200 rpm for 5 min, and buffer discarded.

[0403] Mouse anti-S mAb was diluted 1:1000 with Perm buffer. 50 µl 1:1000 diluted mouse anti-S mAb was added to cells, incubated at RT for 1 h, spun 1200 rpm for 5 min, and buffer discarded. Cells were washed with 150 µl Perm buffer, spun 1200 rpm for 5 min and buffer discarded.

[0404] Goat anti-mouse IgG Alexa 488 was diluted 1:1000 with Perm buffer. 50 µl 1:1000 diluted goat anti-mouse IgG Alexa 488 were added to cells, incubated at RT for 1 h, spun 1200 rpm for 5 min and buffer discarded. Cells were washed with 150 µl Perm buffer, spun 1200 rpm for 5 min, and buffer discarded. Cells were resuspended in 150 µl PBS-0.25% BSA and transfer to flow cytometry.

### Surface Staining (Live Cells) With Primary-Secondary Ab Protocol

[0405] Mouse anti-S mAb was diluted 1: 1000 with PBS-2.5% FBS. Live cells Spun at 1200 rpm for 5 min, and buffer discarded. 50 µl 1:1000 diluted mouse anti-S mAb were added, incubate on ice for 30 min, spun 1200 rpm 5 min, and buffer discarded. Cells were washed with 150 µl PBS-2.5% FBS, spun 1200 rpm for 5 min, and buffer.

[0406] Goat anti-mouse IgG Alexa 488 were diluted by 1:1000 with PBS-2.5% FBS. 50 µl 1:1000 diluted goat anti-mouse IgG Alexa 488 were added to cells, incubated on ice for 30 min, spun 1200 rpm for 5 min, and buffer discarded. Cells were washed with 150 µl PBS-2.5% FBS, spun 1200 rpm for 5 min, and buffer discarded. Cells were fixed with 100 µl 1.5% PFA, incubated on ice for 20 min, spun 1200 rpm for 5 min, and buffer discarded. Cells were resuspended in 150 µl PBS-0.25% BSA and transferred to flow cytometry.

### hACE2 Binding Assay (Live Cells) With Primary-Secondary Ab Protocol

[0407] hACE2 protein (0.31 mg/ml stock) was diluted 1:150 with PBS-2.5% FBS. Live cells were spun at 1200 rpm for 5 min, and buffer discarded. 50 µl diluted hACE2 protein were added, incubate on ice for 30 min, spin 1200 rpm 5 min, and buffer discarded. Cells were washed with 150 µl PBS-2.5% FBS, spun 1200 rpm for 5 min, and buffer discarded.

[0408] Goat anti-hACE2 pAb were diluted 1:200 with PBS-2.5% FBS. 50 µl 1:200 diluted goat anti-hACE2 pAb were added to cells, incubated on ice for 30 min, spun 1200 rpm for 5 min, and buffer discarded. Cells were washed with 150 µl PBS-2.5% FBS, spun 1200 rpm for 5 min, and buffer discarded.

[0409] Donkey anti-goat IgG Alexa 488 were diluted by 1:1000 with PBS-2.5% FBS. 50 µl 1:1000 diluted donkey anti-goat IgG Alexa 488 were added to cells, incubated on ice for 30 min, spun 1200 rpm for 5 min, and buffer discarded. Cells were washed with 150 µl PBS-2.5% FBS, spun 1200 rpm for 5 min, and buffer discarded. Cells were fixed cells with 100 µl 1.5% PFA, incubated on ice for 20 min, spun 1200 rpm for 5 min, and buffer discarded. Cells were resuspended in 150 µl PBS-0.25% BSA and transfer to flow cytometry.

[0410] Protein Samples - Supernatants prior to FLOW
[0411] Collected 2X supernatants (2 ml each) for each construct/ treatment.
[0412] Clarifying spin- 1500 RPM, 5 min, 4° C.
[0413] Placed supernatant into new tubes.
[0414] Place supernatants at -80° C.

[0415] After supernatant removal, cells were placed in PBS and handled for flow processing. ⅓ of a 6 cm dish worth of cells was used to process lysates. Cells were spun down 1500 RPM, 5 min out of cell dissociation buffer and resuspended in 50 µl cold RIPA +PI and incubate on ICE 30 min. Spin 10 min full speed to remove nuclei and place lysates in new tube at -80° C.

### Results: In Vitro RNA Expression, Surface Expression, and hACE2 Binding of SARS CoV-2 Spike SAM RNA Replicons in Muscle Cells by Flow Cytometry.

[0416] The SAM SARS CoV-2 RNA replicons were transfected into cells comparably to the SAM GFP control replicon, based on the percent positive cell values for J2 dsRNA signal. The MFIs of all three spike replicons were similar, indicating replication to a similar degree for the 3 replicons in muscle cells (FIG. 9A, FIG. 9B, FIG. 9C). The SAM SARS CoV-2 RNA replicons were transfected into cells comparably to the SAM mScarlet control replicon, based on the percent positive dsRNA cell values for total protein in fixed cells (FIG. 9D, FIG. 9E). Similarly to what was observed in BHK cells, treatment with BFA was effective and there was only a small amount of spike protein or hACE2 on the surface of the cells when BFA was present (FIG. 9F, FIG. 9G). In the absence of BFA the Spike_ECTO-2P SAM expressed protein was not present on the surface of cells. Both Spike_FL-2P SAM (pJW019) and Spike_WT SAM (pJW020) derived proteins were present on the surface of cells in the absence of BFA treatment. There was a small amount of Spike_ECTO-2P protein detected on the surface of cells which we determined to be background binding of antibody against hACE2 to cells. There was slightly more Spike_FL-2P SAM expressed protein (pJW019) on the surface of cells when compared to the Spike_WT SAM (pJW020), and a correlated increase in the hACE2 receptor bound to the surface of cells in the presence of the Spike_FL-2P SAM expressed protein.

### Day 4

### Lysates & Supernatant Manipulations - PNGASE Treatment of Lysates:

[0417] 2 µl Glycoprotein Denaturing Buffer (10X) and 18 µl of LYSATE were used to make 20 µl final volume reaction. They were heated 100 C 10 minutes, in PCR tubes. The sample were chilled on ice, and centrifuge.

[0418] 5X MM of Glycobuffer, NP-40, and water (1X= 4 µl Glyco2 bf, 4 µl 10% NP40, 12 µl H20) and aliquoted 20 µl into each denatured protein tube (80 µl final). 2 µl PNGase was added to each reaction at 37 C, 1 hr. and -20° C. until day 5.

### Concentration of Supernatants:

[0419] 10X concentrated supernatant were prepared with Amicon ultra-0.5 10 K (Millipore Sigma, UFC501096) devices, two for each sample. Devices were Pre-rinsed with DMEM (No FBS) and 500 µl were place into device for each sample, spun 14,000 g, 20 min, 4° C. Specified supernatant samples were loaded into rinsed columns (500 µl) and spun 20 min. To elute, sample was flipped over into new tube and spun 2 min, 1000x g, 4° C. This resulted in ~100 µl from 1 ml of supernatant once resulting material from two devices are combined. They were kept at -20° C. until day 5.

### Day 5: Run SDS-PAGE and Western Blot

[0420] Prepared lysate sample + sample running buffer (10 µl sample (~5% total 6 cm lysate) + 3.5 µl 4X running buffer + 1.5 µl DTT to 50 mM DTT final (4X LDS sample buffer, Invitrogen, NP0007 /// Licor Chameleon DUO ladder, 928-60000).

[0421] Prepared 20 µl of total reaction for (Volume when 4X SB and DTT are added was 30 ul) each PNGASE F treated sample, equivalent to untreated samples.

[0422] Ran 25 µl of 10X concentrated supernatant on gels with sample buffer and DTT as above. All samples were incubated at 95° C., 5 min. Loaded standards (8 µl Licor ladder), and samples + sample running buffer onto 4-12% gel (1.5 mm 10 well, Novex NP0335BOX).

TABLE 9

Reaction

| | | | | | | | | | | | | |
|---|---|---|---|---|---|---|---|---|---|---|---|---|
| | Gel# | Lane #: | 1 | 2 | 3 | 4 | 5 | 6 | 7 | 8 | 9 | 10 |
| BFA+/-Lysates | 1 | | Ladder | A848 | pJW18 | pJW19 | pJW20 | A848 | pJW18 | pJW19 | pJW20 | Rec Protein |
| 10 uL lysate loaded | Condition | | | BFA- | BFA- | BFA- | BFA- | BFA+ | BFA+ | BFA+ | BFA+ | 100 ng |
| PNGase+/--BFA Lysates | 2 | | Ladder | A848 | A848 | pJW18 | pJW18 | pJW19 | pJW19 | pJW20 | pJW20 | Rec Protein |
| 10 uL PNGase- | Condition | | | PNGase- | PNGase+ | PNGase- | PNGase+ | PNGase- | PNGase+ | PNGase- | PNGase+ | 100 ng |
| 20 uL PNGase + loaded | | | | | | | | | | | | |
| BFA+/ - 10X Concentrated Supes | 3 | | Ladder | A848 | pJW18 | pJW19 | pJW20 | A848 | pJW18 | pJW19 | pJW20 | Rec Protein |
| 25 uL supe loaded | Condition | | | BFA- | BFA- | BFA- | BFA- | BFA+ | BFA+ | BFA+ | BFA+ | 100 ng |

[0423] RAN for ~50 minutes at 200 V constant in 1X MOPS. Gels were transferred to iBlot 2 Gel Transfer device, transfer to nitrocellulose membrane. Ran Program P0, adjusted stage 3 to 5 min for a total of a ten min transfer. Blocked in 10 ml Pierce Protein-Free (PBS) Blocking Buffer, RT 1 hr., rocking. Added primary antibodies in Pierce Protein-Free (PBS) Blocking Buffer, 0.05% tween.

[0424] Primary Spike antibodies: GTX632604 1:1000; Primary Actin antibodies: Rabbit anti-beta-Actin Millipore Sigma MABT523 1:5000. Following application of primary antibody, the sample was washed 3X with 1X PBST (0.2% Tween, Ph 7.4), 5 min each. Appropriate secondary antibodies were added 1 hr. at room temperature.

TABLE 10

Antibodies

| Target | Used at |
|---|---|
| Goat anti-Mouse 680RD | 1:15,000 |
| Goat anti-Rabbit 800CW | 1:15,000 |
| Goat anti-Mouse 800CW | 1:15,000 |
| Goat anti-Rabbit 680RD | 1:15,000 |

[0425] Thereafter, samples were washed 3X, 10 min each, 1× 5 min wash PBS only and processed on Licor.

### Results:

[0426] A fraction of the cells analyzed by flow cytometry above were lysed, in the presence and absence of N-glycosidase, and analyzed by western blot (FIG. 10A, FIG. 10B). Additionally, concentrated supernatants from these samples were also analyzed by western blot to evaluate potential secretion of the expressed spike proteins (FIG. 10C). The spike protein was probed with the same monoclonal mouse Genetex S2 antibody used for flow cytometry and visualized with a secondary Licor near-infrared antibody. Actin was probed as a loading control. Recombinant S protein (rec protein) was run as an antibody specificity control. S0 is uncleaved Spike protein, and KDa= Kilodalton. Each of the three SARS CoV-2 replicon RNA expressed spike protein in cell lysates, and very minimal amounts of spike were secreted into the supernatant. Notably, the Spike_ECTO-2P SAM replicon was present to similar amounts within cells in the presence or absence BFA.

### Example 9. In Vitro LNP Protein Expression Potency of SAM RNA Having Construct A and SAM RNA Having Construct B

[0427] BHK cells (passage 20) were grown in cell culture media (DMEM with 5% FBS, 1%PSG) at 10,000 cells per well in 96 flat bottom plates using standard BSL-2 cell culture techniques. 4 hours later, applied Tecan liquid handing system process the transfection by adding SAM-LNPs to the cells (3-fold, 8-point dilution transfection in triplication) and incubated overnight. 16 hours later, processed the plates followed by below steps. Fixed the cells with 4% PFA in PBS at volume of 50 µl per well for 15 minutes; permeabilized the cells with 0.05% Trixton-100 at volume of 50 µl per well for 15 minutes for 15 minutes; stained with primary antibody in PBS: SARS-CoV/SARS-CoV-2 S del 10 mouse mAb at 1:1000 dilution at volume of 50 µl per well for 1 hour; stained with secondary antibody Goat anti-Mouse IgG (H+L) Highly Cross-Adsorbed, Alexa Fluor Plus 647 at 1:1000 dilution with Hoechst 33342 at 1:2000 dilution at volume of 50 µl per well for 1 hour. Results were read using a High Content Imaging machine with Compartment Analysis application.

### Results: SAM SARS-CoV2 LNP in Vitro Protein Expression Potency With BHK Cells by High Content Imaging Assay

[0428] Before transferring the vaccine to immunogenicity evaluation in mice, 2 SAM RNA were formulated with LNP. In vitro LNP protein expression potency assays were performed in BHK cells. Results were measured using a high content imaging machine and are reported as the EC50 value, where lower values indicate a more potent SAM (LNP). The titration curves, bar figure as well as the representative images obtained from the in vitro protein expression potency assays for SARS-CoV-2 SAM (LNPs) were shown in the figures. FIG. 11A depicts EC50 curve, both samples were able to generate EC50 curves successfully. The EC50 of Spike_ECTO-2P SAM (JW18) (LNP) was 0.7554 ng/well, and Spike_FL-2P SAM(JW19) (LNP) was 0.8635 ng/well. FIG. 11B discloses an EC50 bar graph. FIG. 11C depicts results images from HCI 10x objective: JW18: Spike_ECTO-2P SAM (LNP); JW19: Spike_FL-2P SAM (LNP)).

### Example 10: SARSCoV-2 Experimental Vaccine Using SAM RNA Having Construct A and SAM RNA Having Construct B in the Female BALB/c Mouse

[0429] Female BALB/c mice (7-8 weeks old) received 2 intramuscular (IM) injections 3 weeks apart in the hind leg thigh muscle, with different doses of (pJW019) SARS-CoV-2 Spike_FL-2P SAM(CNE) (0.15 µg, 1.5 µg or 15 µg), or SARS-CoV-2 Spike_FL-2P SAM (LNP) (0.015 µg, 0.15 µg or 1.5 µg), or (pJW018) SARS-CoV-2 Spike_ECTO-2P SAM (LNP) (0.015 µg and 0.15 µg). Additional groups received a saline solution, or 3 µg of Spike ecto recombinant protein adjuvanted with AS03, following the same schedule of immunization, and used as negative and positive control groups, respectively. Serum samples were collected 21 days after the first immunization (3wp1) and 15 days after the second immunization (2wp2) to assess antibody responses. Spleens and inguinal lymph nodes (LN) were collected 3wp1 from 5 mice in groups 1 and 3 for CMI and B-cell assay development and 2wp2 from 5 mice from all groups to characterize Spike-specific T-cell and germinal center B- cell responses. Details of the study design are provided in FIG. 14.

TABLE 11

Immunization Groups, Geometric Mean Titers, Neutralization Titers for Study Groups

| Group | N | Vaccine | Dose | Formulation | IgG GMT 3wp1 (AU) | IgG GMT 2wp2 (AU) | GMT 50% Neutralization 2wp2 |
|---|---|---|---|---|---|---|---|
| 1 | 10* | Saline | | | 0.004 | 0.004 | 10.00 |
| 2 | 12 | Spike_ECTO-2P protein (Construct B) | 3 µg | AS03 | 27.880 | 1027.000 | 4832.00 |
| 3 | 17 | Spike_FL-2P SAM (Construct A) | 15 µg | CNE | 6.853 | 41.470 | 173.40 |
| 4 | 12 | Spike_FL-2P SAM (Construct A) | 1.5 µg | CNE | 1.499 | 9.828 | 32.62 |
| 5 | 12 | Spike_FL-2P SAM (Construct A) | 0.15 µg | CNE | 0.042 | 1.889 | 11.08 |
| 6 | 12 | Spike_FL-2P SAM (Construct A) | 1.5 µg | LNP | 30.550 | 158.000 | 2483.00 |
| 7 | 12 | Spike_FL-2P SAM (Construct A) | 0.15 µg | LNP | 5.309 | 154.600 | 640.30 |
| 8 | 12 | Spike_FL-2P SAM (Construct A) | 0.015 µg | LNP | 4.489 | 101.500 | 279.90 |
| 9 | 12 | Spike_ECTO-2P SAM (Construct B) | 0.15 µg | LNP | 0.516 | 35.730 | 17.88 |
| 10 | 12 | Spike_ECTO-2P SAM (Construct B) | 0.015 µg | LNP | 0.016 | 1.129 | 10.00 |

* 5 mice from group 1 and 5 mice from group 3 were sacrificed on day 21 for spleen and LN collections for CMI and B-cell assay set up. All mice in the saline group had undetectable titers and were assigned a value of ½ of the Standard Curve LLOQ.

TABLE 12

Dosing

| | |
|---|---|
| Immunization method | Intramuscular- Upper hind leg (thigh) |
| Dose volume | Groups 1, 2 and 6-10: 50 µl/dose equally divided [25µl/hindleg (thigh muscle) for each dose] Groups 3, 4 and 5: 100 µl/dose equally divided [50µl/hindleg (thigh muscle) for each dose] |
| Materials | Insulin syringe with attached 28-gauge needle |
| Frequency | Day 0- 1st dose Day 21- 2nd dose; post 1st serum collection |

### Spike Specific IgG Titers

[0430] The titers of Spike-specific serum IgG binding antibodies were measured using a Luminex based assay. Luminex microspheres were covalently coupled with SARS-CoV-2 Spike antigen using sulfo-NHS and EDC according to manufacturer’s instructions. In 96-well plates, 1,500 microspheres/well suspended in 50 µl of PBS, 1% BSA + 0.05% Na Azide (assay buffer) were added to 100 µl of five-fold serially diluted mouse serum. After incubation of the microspheres and serum on an orbital shaker, covered, at RT for 60 min., the microspheres were washed twice with 200 µl/well of PBS, 0.05% Tween-20 (wash buffer) on a plate washer using a magnet to allow settling of beads between washes. After the second wash, the beads were suspended with 50 µl/well of r-Phycoerythrin (r-PE) conjugated anti-mouse IgG, (Fcy Fragment of subclasses 1+2a+2b+3), at a 1:50 dilution. The plates were covered and incubated on an orbital shaker at RT for 60 min. After a final plate wash (same as described above), the samples were resuspended in 80 µl of PBS, covered and incubated at room temperature (RT) on an orbital shaker for 20 minutes. Fluorescence intensity was measured using a Luminex FlexMap 3D. A standard composed of three monoclonal antibodies (mAb) to the S protein added into naïve mouse serum (Table 13) was used to calculate sample titers. The standard was assigned a value of 100 AU (Assay Units). The sample titers were interpolated based on a four parameter logistic fit of the standard curve. Data points for calculation of sample titers were selected from within the range of 10% to 70% of the lower and upper asymptote of the standard curve. The final sample titer was the average of the back calculated titers for dilutions falling within the acceptable range of the standard curve.

TABLE 13

mAb used for the serum standard

| | | |
|---|---|---|
| Source | Catalog# | Specificity to Spike Region |
| Gene Tex | GTX632604 | S2 |
| MP Biomedical | 8720412 | S2 |
| Absolute Antibody | Ab01680-10.0 | S1 |

### Results

[0431] Endpoint titers from each group were combined to calculate Geometric Mean Titers (GMT) with 95% confidence intervals (Table 11 and FIG. 15). Geometric Mean Ratios (GMR) were calculated to demonstrate fold-differences for study groups comparisons (FIG. 16A, FIG. 16B, FIG. 17A and FIG. 17B). Data were analyzed within formulations and between formulations.

[0432] The Geometric Mean Titers from all the groups demonstrated that immunization with all SAM formulations expressing Spike protein were immunogenic after one and two doses. Boosting of the immune response was observed after the second dose in all SAM and AS03-adjuvanted Spike protein groups. Comparisons of the lowest dose of Spike_FL-2P SAM (LNP) formulation (0.015 µg) demonstrated that there was a decrease in the IgG GMT as compared to either higher Spike_FL-2P SAM (LNP) formulations (1.5 µg and 0.15 µg) after the second dose. An examination of the GMTs within the CNE and LNP formulation of Spike_FL-2P SAM indicated that there was a dose response for the CNE formulations. This trend was not observed in the LNP formulations where no dose response trend was observed across the three dosing formulations from 1.5 µg to 0.015 µg. Additionally, the GMTs for the 1.5 µg and 0.15 µg dose of LNP had similar titers after the second dose with a GMR of 0.98. The highest IgG binding antibody response was observed with the AS03-adjuvanted Spike_ECTO-2P protein group.

[0433] A comparison of the Geometric Mean Ratios for comparable doses of the Spike_FL-2P SAM vaccines demonstrated that the LNP delivery formulations elicited higher IgG binding antibody titers than the CNE delivery formulation at both the 1.5 µg and 0.15 µg dose. The GMR for the 1.5 µg and 0.15 µg dose indicated that the IgG binding antibody response was between 16- to 80-fold higher with the LNP formulation as compared to the CNE formulation. A similar comparison of the Spike_FL-2P SAM to the Spike_ECTO-2P SAM, both formulated in LNP, again demonstrated the higher IgG binding antibody titers for the Full-length Spike SAM formulations. The GMR for the 0.15 µg and 0.015 µg dose indicated that the IgG binding antibody response was between 4-to 90-fold higher with the Spike_FL-2P SAM formulation as compared to the Spike_ECTO-2P SAM formulation.

[0434] The Spike-specific IgG binding antibody titers indicated that the SARS-CoV-2 Spike_FL-2P SAM investigational vaccine was immunogenic at all SAM doses tested with either the CNE or LNP delivery formulations. However, the SAM LNP formulations elicited higher IgG binding antibody levels than the corresponding CNE formulations. These data also indicated that there was a dose response for the SARS-CoV-2 Spike_FL-2P SAM (CNE) formulations from the 15 µg to 0.15 µg doses, whereas a dose response was not observed for the LNP formulations, but a trend with a decrease in IgG binding antibody titers was observed when comparing either the 1.5 µg or 0.15 µg dose to the 0.015 µg dose.

### Antibody Neutralization

[0435] A neutralization assay using SARS-CoV-2 mNeonGreen reporter virus was used to test the neutralizing activity of serum antibodies. Vero CCL-81 cells (1.2 × 104) in 50 µl of DMEM (Gibco) containing 2% FBS (HyClone) and 100 U/ml Penicillium-Streptomycin (P/S; Gibco) were seeded in each well of black µCLEAR flat-bottom 96-well plate (Greiner Bio-one™). Cells were incubated overnight at 37° C. with 5% CO2. On the following day, serum samples were serially diluted two-fold in 2% FBS and 100 U/ml P/S DMEM, and incubated with mNG SARS-CoV-2 at 37° C. for 1 h. The virus-serum mixture was transferred to the Vero CCL- 81 cell plate with the final multiplicity of infection (MOI) of 0.5. For each serum, the starting dilution was 1/20 with nine two-fold dilutions to the final dilution of 1/5120.

[0436] After incubating the infected cells at 37° C. for 16 hrs., 25 µl of Hoechst 33342 Solution (400-fold diluted in Hank’s Balanced Salt Solution; Gibco) were added to each well to stain the cell nucleus. The plate was sealed with Breath-Easy sealing membrane (Diversified Biotech), incubated at 37° C. for 20 min, and quantified for mNG fluorescence on CytationTM 7 (BioTek). The raw images (2 × 2 montage) were acquired using 4× objective, processed, and stitched using the default setting. The total cells (indicated by nucleus staining) and mNG-positive cells were quantified for each well. Infection rates were determined by dividing the mNG-positive cell number with the total cell number. Relative infection rates were obtained by dividing the infection rates of serum-treated wells with the infection rate of the non-serum treated controls well. The curves of the relative infection rates versus the log transformed serum dilutions were plotted using Prism 8 (GraphPad). A 4-parameter logistic curve fit was used to determine the dilution fold that neutralized 50% of mNG fluorescence (NT50). The upper and lower asymptotes of the fitted curve were constrained to 100 and 0. Each serum was tested in duplicate and the final result was the geometric mean of the two results.

### Results:

[0437] For each serum, a nonlinear regression method was used to determine the dilution fold that neutralized 50% of mNG fluorescence (NT50), reported in FIG. 18 and Table 11. The NT50 demonstrated that immunization with all Spike_FL-2P SAM (LNP) formulations expressing Spike protein elicited functional antibody titers after two doses. 1.5 µg of SARS-CoV-2 Spike_FL-2P SAM (LNP) and the AS03-adjuvanted Spike protein vaccines induced the highest neutralizing titers among all vaccine groups. SARS-CoV-2 Spike_FL-2P SAM (LNP) at the 1.5 µg dose induced higher neutralizing titers compared to the Spike_FL-2P SAM (LNP) at the 0.15 µg and 0.015 µg doses (p<0.0001).

[0438] A comparison of the Geometric Mean Ratios for comparable doses of the Spike_FL-2P SAM vaccines demonstrated that the LNP delivery formulations elicited significantly higher neutralizing antibody titers than the CNE delivery formulation at both the 1.5 µg (p<0.0001) and 0.15 µg (p<0.0001) doses. (FIG. 19A, FIG. 19B).

[0439] A similar comparison of the Spike_FL-2P SAM to the Spike_ECTO-2P SAM, both with 0.15 µg SAM formulated in LNP, again demonstrated significantly higher neutralizing antibody titers for the Full-length Spike SAM formulations (p<0.0001). (FIG. 20).

[0440] The results suggest that the SARS-CoV-2 Spike_FL-2P SAM (LNP) vaccine induced high neutralizing antibody titers against SARS-CoV-2 virus. The Spike_FL-2P SAM (LNP) formulations elicited a dose-dependent response, with higher neutralizing antibody titers than the corresponding Spike_FL-2P SAM (CNE) doses (p<0.0001).

### Spike-Specific B-Cell Responses

[0441] Characterization of Spike-specific B-cells from spleen and draining lymph nodes of vaccinated animals was performed using flow cytometry. Cell suspensions prepared from spleen, or pairs of inguinal lymph nodes from each mouse, were stained with near IR live/dead cell stain for 20 min at room temperature and then incubated with Fc block in PBS plus 1% FBS (HyClone, Thermo Scientific) for 10 min at 4° C. Approximately 1-2 x10⁶ splenocytes or LN cells were stained for 30 min at 4° C. with the following mAb: anti-CD3 BUV737, anti-CD19 BV786, anti-IgD BV421, anti-IgM BUV395, anti-GL7 AF647, anti-CD95 BV711, anti-CD138 BB700, anti-CD38 BV650, anti-CD80 PECF594, anti-CD73 PE-Cy7, anti-CD273 PE. To identify Spike-specific B-cells, samples were stained with 1 µg per 1-2 x106 cells of SARS-CoV-2 Spike protein labelled with Alexa Fluor 488.

### Results:

[0442] During the generation of vaccine-specific B-cells, upon activation, antigen-specific B cells migrate to the B-cell follicle, in the spleen or the draining lymph nodes, where they lose IgM and IgD membrane expression (class-switching), differentiate into germinal center B-cells, and undergo through the processes of somatic hypermutation and affinity maturation. A characterization of the Spike-specific B-cells induced by the SARS-CoV-2 SAM vaccines was performed in spleens and inguinal draining lymph nodes, 2 weeks after the second immunization (2wp2, Day 36). The frequencies of total and Spike specific class-switched B-cells (identified as CD3-CD19+IgM-IgD- B cells) were measured and their phenotype characterized based on the expression of specific surface markers. Memory B-cells were identified as CD95-CD38+ cells, and germinal center Bcells as GL7+CD95+ cells. Furthermore, CD80, PD-L2 and CD73 expression markers were used to provide further characterization of the Spike-specific B-cells elicited by the SARS-CoV-2 SAM (LNP) vaccine.

### B-Cell Responses in the Spleen at 2wp2

[0443] Total B-cell responses in the spleen from all study groups were evaluated 2 weeks after the second vaccination (FIG. 21A, FIG. 21B). Only mice receiving the AS03-adjuvanted recombinant protein vaccine showed germinal center B-cells in the spleen (FIG. 21B).

[0444] High frequencies of the Spike-specific IgD-IgM- B-cells were observed in mice receiving 1.5 µg and 0.15 µg of the SARS-CoV- 2 Spike_FL-2P SAM (LNP) as well as in mice receiving AS03-adjuvanted recombinant Spike protein (FIG. 22A). Further analysis showed that most of the Spike-specific B-cells from the 1.5 µg SARS-CoV-2 Spike_FL-2P SAM (LNP) and the AS03-adjuvanted recombinant Spike protein groups had a memory phenotype (FIG. 22B, FIG. 22C).

### B-Cell Responses in the Inguinal Draining Lymph Node at 2wp2

[0445] B-cell responses in the pair of inguinal draining lymph nodes were characterized 2 weeks after the second immunization. Frequencies of IgM-IgD- B cells increased in the draining lymph node of mice receiving 1.5 µg SARS-CoV-2 Spike_FL-2P SAM (LNP) and AS03-adjuvanted Spike recombinant protein, and over 70- and 80%, respectively, showed a germinal center phenotype (FIG. 23A, FIG. 23B).

[0446] Mice immunized with 1.5 µg and 0.15 µg SARS-CoV-2 Spike_FL-2P SAM (LNP) and AS03-adjuvanted Spike recombinant protein showed Spike-specific IgMIgD- B-cells, with a dose-dependent response observed in the SAM (LNP) groups (FIG. 24A); over 90% of those cells had a germinal center phenotype (FIG. 24B).

[0447] Spike-specific IgM-IgD- B-cells were characterized for the surface expression of CD73, CD80 and CD273 germinal center markers in mice receiving SARS-CoV-2 Spike_FL-2P SAM (LNP) and AS03-adjuvanted Spike recombinant protein (FIG. 25A, FIG. 25B, FIG. 25C). Nearly 90% of the Spike-specific IgM-IgD- B-cells expressed CD73 in both groups; however, the 1.5 µg SARS-CoV-2 Spike_FL-2P SAM group had a trend toward higher frequencies of CD80+ cells and lower frequencies of CD273+ cells compared to the AS03-adjuvanted Spike protein group, suggesting for potentially improved Tfh development, germinal center B-cell survival, and plasma cell generation.

[0448] The results showed that high frequency of Spike-specific B-cells was observed in mice receiving the AS03-adjuvanted or the SARS-CoV-2 Spike_FL-2P SAM (LNP) vaccine. The responses observed in the SAM (CNE) and in the SAM-ecto (LNP) groups were overall lower. The highest responses were observed in the inguinal draining lymph node where most Spike specific B-cells have a germinal center phenotype. AS03-adjuvanted Spike protein, 1.5 µg and 0.15 µg SARS-CoV-2 Spike_FL-2P SAM (LNP) vaccinations induced high frequency of IgM-IgD- Spike-specific B-cells, with a dose-dependent response was observed in the SAM LNP groups. Overall, those data showed a strong germinal center response for the 1.5 µg SARS-CoV-2 Spike_FL-2P SAM (LNP) vaccine, indicating B-cell responses of high quality and quantity with a potential induction of high-affinity long lasting B cells.

### T-Cell-Mediated Immunity - Spike-Specific T-Cell-Mediated Immunity (Spike CMI)

[0449] To assess the T-cell-mediated immune (CMI) responses induced by each vaccine candidate, spleens were collected from 5 mice/group at 2wp2 (Day 36) and SARS-CoV-2 Spike-specific T-cell responses were measured using intracellular cytokine staining (ICS) and multiparametric flow cytometry for individual mice. The analysis of cell-mediated immune responses included measurement of magnitude of total spike-specific CD4+ and CD8+ T-cells and magnitude of various T helper (Th) subsets within the total spike- specific CD4+ (denoted as Th0, Th1, Th2, and Th17) and CD8+ (denoted as Tc0, Tc1, Tc2, and Tc17) T cells (FIG. 26A, FIG. 26B).

[0450] CoV-2 Spike SAM (LNP) vaccines induced significantly higher levels of total spike-specific CD8+ T-cells than CoV-2 Spike SAM (CNE) vaccines at comparable doses (p<0.0001 with 13.7-fold change of the 1.5 µg Spike_FL-2P SAM (LNP) group over the AS03-adjuvanted group). No significant difference was observed in frequencies of total spike-specific CD8+ T-cells between FL spike vs. ecto CoV-2 Spike SAM (LNP) vaccines at comparable doses. All CoV-2 Spike SAM vaccines induced significantly higher total spike-specific CD8+ T-cells than CoV-2 Spike protein adjuvanted with AS03. All CoV-2 Spike SAM groups had significantly higher Spike-specific CD4+ Th1 responses than CoV-2 Spike protein adjuvanted with AS03. (p<0.0001; 8-fold changes of the 1.5 µg Spike_FL-2P SAM (LNP) group over the AS03-adjuvanted group). All CoV-2 Spike SAM candidate vaccines induced significantly lower frequencies of CD4+ T cells than AS03-adjuvanted CoV-2 Spike protein vaccine, apart from the SAM (CNE) 15 µg and 1.5 µg doses and the SAM (LNP) 1.5 µg dose groups. CoV-2 Spike protein vaccine adjuvanted with AS03 elicited primarily Th0 and Th2 responses from the CD4+ T-cell compartment, with significantly higher Th0, Th2, and Th17 responses than SAM vaccines. A dose response was observed for all SARS-CoV-2 Spike SAM vaccines from primarily the Th0, Th1 subsets.

[0451] Further characterization of the spike-specific polyfunctional (FIG. 27) CD4+ and CD8+ T-cell cytokines responses was also performed. CoV-2 Spike SAM (LNP) and CoV-2 Spike SAM (CNE) vaccine groups induced primarily CD107a+ IFN-γ+ TNF-α+ triple positives and CD107a+ IFN-γ+ double positives in CD4+ T-cells. CoV-2 Spike protein adjuvanted with AS03 vaccine group induced primarily IL-2 and TNF-α single positives, and IL-2+ TNF-α+ double positives at nominal levels in CD4+ T-cells. SARS-CoV-2 Spike SAM (LNP) and SARS-CoV-2 Spike SAM (CNE) vaccines induced primarily CD107a+ IFN-γ+ TNF-α+ triple positives and CD107a+ IFN-γ+ double positives in CD8+ T-cells. The distribution profile of the CD8+ T-cell polyfunctional response indicates robust vaccine-induced cytolytic, immunomodulatory, pro-inflammatory, and potential anti-viral activity and is promising for the SAM platform. SARS-CoV-2 Spike protein/AS03 vaccine group induced primarily low levels of CD107a+ (teal) and IL-2+ single positives in CD8+ T-cells.

[0452] Further characterization of the spike-specific individual (FIG. 28A, FIG. 28B, FIG. 28C, FIG. 28D, FIG. 28E, FIG. 28F and FIG. 29A, FIG. 29B, FIG. 29C, FIG. 29D) CD4+ and CD8+ T-cell cytokines responses was also performed. With regard to CD4+, all SARS-CoV-2 Spike SAM vaccine groups induced significantly higher CD107a and IFN-γ than AS03-adjuvanted SARS-CoV-2 Spike protein vaccine from CD4+ T-cells. The SARS-CoV-2 Spike protein/AS03 vaccine induced significantly higher IL-4/IL-13, IL-2, TNF-α and IL-17F than all doses of SAM vaccines from CD4+ T cells. With regard to CD8+, all SARS-CoV-2 Spike SAM vaccine groups induced significantly higher levels of CD107a, IFN-γ, IL-2, and TNF-α than SARS-CoV-2 Spike protein/AS03 vaccine from the CD8+ T-cell compartment. SARS-CoV-2 Spike SAM (LNP) vaccines induced significantly higher CD107a and IFN-γ than same dose of SARS-CoV-2 Spike SAM (CNE) in CD8+ T-cells. A statistically significant dose response was observed for SARS-CoV-2 Spike SAM (LNP) vaccines for CD107a, IFN-γ, and TNF-α from the CD8+ T-cells.

### T-Cell-Mediated Immunity - Non-Structural Proteins (nsP) Specific Cell-Mediated Immunity (nsP CMI)

[0453] The cell-mediated immune responses to SAM nsPs were assessed in spleens at 2wp2 (Day 36). The analysis included measurement of magnitude of total SAM nsP-specific CD4+ and CD8+ T-cells using combination of nsP-1, nsP-2, nsP-3, and nsP-4 peptide pools (FIG. 30).

[0454] All SARS-CoV-2 Spike SAM vaccines induced low levels of anti-nsP immunity from the Th0 and Th1 subsets within both CD4+ and CD8+ T-cell compartments. SARS-CoV-2 Spike_FL-2P SAM (LNP) vaccine at 1.5 µg dose induced significantly higher frequencies of nsP-specific T-cells than comparable dose of SARS-CoV-2 Spike_FL-2P SAM (CNE). A dose response was observed for nsP-specific T-cells for SARS-CoV-2 Spike_FL-2P SAM (LNP) vaccine, which was significant for the Th0 subset in CD4+ T cells and significant for Th0, Th1 and total CD8+ T-cells. Background frequencies of nsP-specific CD4+ and CD8+ T-cells were observed in the saline and AS03-adjuvanted SARS-CoV-2 Spike protein.

### T-Cell-Mediated Immunity - T Follicular Helper (Tfh) Responses in the Spleen

[0455] The total Tfh responses were measured in spleen at 2wp2 (Day 36). Vaccination with AS03-adjuvanted SARS-CoV-2 Spike protein induced significantly higher frequencies of Tfh cells compared to the saline and SAM (CNE) and SAM (LNP) vaccinated groups in the spleen (FIG. 31).

### Example 11. Making and Testing SAM Having Derivatives of Constructs A and B Containing Putative Expression and Secretion Modifications

[0456] In most constructs, the 16 or 18 N-terminal residues (putative antigen signal sequence) were replaced by heterologous signal sequences. In some constructs, the ER retention signal was replaced. See Tables 2 and 3, above. The constructs were evaluated in mammalian cells following electroporation of SAM RNA into BHK cells using antigen expression by flow cytometry, immunoblots and immunofluorescence assays, to investigate protein in cell lysates, on the cell surface and on cell supernatant.

### 11.1 Full Length SARS-COV2 S Constructs

[0457] Table 15: SARS-CoV-2 Spike SAM mutants. In this Table and related text, a shorthand naming convention is adopted, referring to “pKL026” of Table 3 as “KL26”. In this section 11.1, “WT” refers to the pJW19 construct, which encodes spike protein having its native signal sequence.

| | |
|---|---|
| KL26 | c-terminal deletion (after 1273aa) in pJW19 |
| KL28 | Replacement of the first 18aa with GauLUCss in pJW19 |
| KL31 | Replacement of the first 16aa with CD33ss in pJW19 |
| KL33 | Replacement of the first 16aa with hlL2ss in pJW19 |
| KL34 | Replacement of the first 18aa with hlL2ss in pJW19 |
| KL35 | Replacement of the first 16aa with hlgEss in pJW19 |
| KL36 | Replacement of the first 18aa with hlgEss in pJW19 |
| KL37 | Replacement of the first 16aa with hLCkappass in pJW19 |
| KL38 | Replacement of the first 18aa with hLCkappass in pJW19 |
| KL40 | Replacement of the first 18aa with JEVSss in pJW19 |
| KL42 | Replacement of the first 18aa with JEVLss in pJW19 |
| KL43 | Replacement of the first 16aa with mLCkappass in pJW19 |
| KL44 | Replacement of the first 18aa with mLCkappass in pJW19 |
| KL47 | Replacement of the first 16aa with GauLUCss (AKP) in pJW19 |
| KL48 | Replacement of the first 18aa with GauLUCss (AKP) in pJW19 |

[0458] In this regard, BHK-21 cells (passage 27) were placed in T225 flask at approximately 1e⁷ cells/flask and culture overnight. SAM RNA was diluted to 50 ng/µl.

TABLE 16

Electroporation of RNA

| SAM | ng/µl | Use µl | H₂O µl | Actual ng/µl | µl for 250 ng |
|---|---|---|---|---|---|
| JW19 | 1700 | 2 | 66.00 | 52.92 | 4.72 |
| KL26 | 424.4 | 4 | 29.95 | 48.89 | 5.11 |
| KL28 | 770 | 2 | 28.80 | 65.27 | 3.83 |
| KL31 | 1153 | 2 | 44.12 | 57.64 | 4.34 |
| KL33 | 452 | 4 | 32.16 | 43.97 | 5.69 |
| KL34 | 660.2 | 2 | 24.41 | 44.78 | 5.58 |
| KL35 | 478 | 4 | 34.24 | 47.94 | 5.21 |
| KL36 | 600.5 | 2 | 22.02 | 40.22 | 6.22 |
| KL37 | 570.2 | 2 | 20.81 | 44.08 | 5.67 |
| KL38 | 729.1 | 2 | 27.16 | 41.91 | 5.97 |
| KL40 | 591.6 | 2 | 21.66 | 38.32 | 6.52 |
| KL42 | 643.4 | 2 | 23.74 | 51.1 | 4.89 |
| KL43 | 1406 | 2 | 54.24 | 47.1 | 5.31 |
| KL44 | 1169 | 2 | 44.76 | 45.39 | 5.51 |
| KL47 | 1512 | 2 | 58.48 | 48.3 | 5.18 |
| KL48 | 769.9 | 2 | 28.80 | 43.11 | 5.80 |
| GFP (A848) | 180 | 4 | 10.40 | 45.47 | 5.50 |

### SAM Was Mixed With Mouse Thymus RNA (Mock):

[0459] TABLE 17

SAM Mix

| | | |
|---|---|---|
| | Per electroporation | 2+ 0.5 electroporations |
| BHK-21 cells | 250 µl of 4e⁶ cells/ml | 625 µl |
| RNA (total 4.2 µg) | 100 ng SAM | 250 ng |
| | Mouse thymus (Mock) RNA 4.1 µg | 10.25 µg |

[0460] Cells were Trypsinized and collected, wash with cold Opti-MEM once, resuspend cells in cold Opti-MEM at 4e⁶ cells/ml. 6-well plates were prepared with 2 ml medium-1 % FBS/well. Plates were pre-warmed in incubator. Cells were mixed with RNA and electroporate cells/RNA mixture with Bio-Rad Gene Pulser: (Voltage 120 V, Pulse length 25 ms, Pulse 1. Pulse interval 0, Cuvette 2 mm). 250 µl medium from the pre-warmed 6-well plate were added, resuspend and transfer cells back to 6-well plate. At 18 hpt, supernatant were collected and process cells for flow cytometry and Western blot (lysis). GFP SAM were used as positive control for RNA electroporation.

### Flow Cytometry

[0461] Supernatant was collect and saved at -80° C. Added 200 µl 0.25% trypsin-EDTA to cell monolayer and incubated at 37° C. for 5 min. 500 µl medium was added, cells were resuspended and transferred 150 µl cells/well to 96-well U-bottom plates and 150 µl cells to a tube for lysis.

[0462] Spike surface staining: Cells were spun at 1200 rpm for 5 min and medium discarded. Cells were wash with 150 µl cold PBS-2.5% FBS. Cells were spun 1200 rpm 5 min, buffer discarded, and cells kept on ice. Cells were resuspended with 100 µl 1:1000 diluted mouse anti-SARS-CoV-2 S mAb in PBS-2.5% FBS and incubated on ice for 1 hr. Cells were spun 1200 rpm 5 min, washed with 150 ul PBS-2.5% FBS, spun 1200 rpm 5 min, buffer discarded and cells kept on ice. Cells were resuspended with 100 µl 1:1000 diluted goat anti-mouse IgG Alexa 488 in PBS-2.5% FBS and incubated on ice for 30 min and spun 1200 rpm 5 min. Cells were wash with 150 µl PBS-2.5% FBS, spun 1200 rpm 5 min, buffer discarded, and cells kept on ice. Cells were resuspend with 150 µl PBS-0.25% BSA. Flow cytometry was ran on MACSQuant VYB with channel B1 (GFP/488).

[0463] The following steps, with fix/permeabilization, were for SARS-CoV-2 Spike whole cell staining: Cells were spun 1200 rpm 5 min and medium discarded. Cells were resuspended with 100 µl Fix/Perm buffer, incubated at 4° C. for 20 min, and spun 1200 rpm 5 min. Cells were wash with 150 µ perm buffer once, spun 1200 rpm for 5 min and buffer discarded.

[0464] (Spike staining) Cells were mixed cells with 100 µl 1:1000 diluted anti-SARS-CoV-2 Spike mAb in Perm buffer, incubated at room temperature for 1 hr., and spun 1200 rpm 5 min. Cells were wash with 150 µl Perm buffer once, spun 1200 rpm 5 min and buffer discarded. Cells were mixed with 100 µl 1:1000 goat anti-mouse IgG Alexa 488, incubated at room temperature for 1 hr., spun 1200 rpm 5 min, and buffer discarded. Cells were wash with 150 µl Perm buffer once, spun 1200 rpm 5 min and buffer discarded. Cells were resuspend in 150 µl PBS-BSA (0.25%) and flow cytometry ran on MACSQuant VYB with channel B1 (GFP/488).

### Results

[0465] Results of % of antigen positive cells are shown in FIG. 40, FIG. 41. and FIG. 42. Both SAM encoding full-length spike protein having a wild-type signal sequence (WT Spike SAM; JW19) and GFP SAM worked well as positive controls. GFP SAM at 100 ng achieved 53% GFP positive cells. FIG. 41. WT Spike SAM showed 21% spike positive cells by both whole cell and surface spike staining. FIG. 40. The majority of mutants ranged from 5% to 15% spike positive cells (more than half at 10-15% range) by both whole cell and surface Spike staining. KL26 showed fair % of whole cell spike staining, but low % and MFI of surface staining, indicating low surface expression. KL40 showed very low % of antigen positive cells by all staining (whole cell and surface spike staining). Based on > 10% spike positive cells and > 1.2 fold of WT surface spike MFI as cut offs, KL28, KL43, KL47, and KL48 are noted. 8. Comparing surface spike histograms of mutants against WT, KL48 had a clear shift to higher surface spike level than WT. FIG. 43 and FIG. 44 depicts % of spike positive BHK cells with 300 ng and 2 µg RNA electroporation, respectively. Due to low % of spike positive cells, KL35, 36, 37 and 38 remain unclear and require more studies.

### 11.2 SARS-CoV-2 Spike Ecto SAM Mutants

[0466] SARS-CoV-2 spike Ecto SAM mutants were prepared as previously described, % of antigen positive BHK cells are shown in FIG. 45. Related SARS-CoV-2 spike Ecto SAM mutants’ supernatant and cell lysates were frozen. In this section 11.2, “WT” refers to the pJW18 construct encoding the ecto spike protein having the native signal sequence.

[0467] Concentrate supernatant: Supernatants were thawed and clarified by centrifugation and 2000 rpm for 5 min. 500 µl supernatant was added to Amicon Ultracel-10K, and spun 13.2K rpm for 15 min at 4° C. Flow-through was removed, column put back in reverse position, spun at 13.2 K rpm for 1 min at 4° C., resulting in 50 µl concentrated supernatant.

[0468] Western Blot: Cell lysates were thawed where approximately 8.5e⁵ cells were lysed in 112 ul RIPA buffer. Cell lysate or concentrated supernatant were mixed with SDS Sample buffer and DTT, heat on 100° C. heating block for 10 min.

TABLE 18

Western Blot

| | | |
|---|---|---|
| | Supernatant | Cell lysate |
| Cell lysate | | 14 µl (app. 1e⁵ cells) |
| Supernatant concentrated | 21 µl (app. 1e⁵ cells | |
| SDS-Sample buffer (4x) | 7 µl | 6 µl |
| 1 M DTT | 1 µl | 1 µl |

[0469] Criterion TGX Precast Gel 4-20% was set up in Criterion Cell apparatus, samples were loaded and run at constant amp of 60 mA/gel (120 mA for 2 gels). Proteins were transferred from gel to NC membrane on iBlot2 apparatus with P0 program (20 V for 1 min, 23 V for 4 min, 25 V for 2 min). Protein-free (PBS) Blocking Buffer was used to block NC membrane for 1 hr. The membrane was incubated with 1:4000 diluted mouse anti-SARS-CoV-2 spike mAb and rabbit anti-Actin mAb in blocking buffer overnight then washed with PBS-0.1% Tween 20 (PBST) three times. Membrane was incubated with secondary antibodies 1:20,000 diluted in blocking buffer for 1 hr. Membrane was wash with PBST three times and infrared (IR) image was captured on Odyssey CLx with 700 nm and 800 nm channels.

### Results

[0470] Mouse anti-spike mAb detected doublet high MW (>260 kDa) spike protein bands in supernatants of S Ecto SAM-transfected BHK cells. The mAb-detected protein bands seemed to be spike-specific, not seen with Mock RNA. The levels of spike proteins in supernatant of KL70 (corresponding to FL mutant KL48) were higher than WT. The levels of spike proteins in supernatants of other mutants were similar or lower than WT.

[0471] Mouse anti-spike mAb detected a single 180-kDa spike protein band in cell lysate of S Ecto SAM-transfected BHK cells. The levels of spike proteins in cell lysates correlated with % of spike protein positive cells. All mutants were lower than WT. Overall, KL70 showed lower spike protein in cell lysate but higher spike protein in supernatant than WT, suggesting its mutation increased secretion of spike Ecto.

[0472] Based on the amount of spike protein in supernatant and cell, the supernatant-to-cell ratio of most mutants were within 1-2 fold of WT, except for KL49, KL50, KL69 and KL70. (text, a shorthand naming convention is adopted, referring to “pKL049” of Table 2 as “KL49”.) The supernatant to cell ratios of mutant KL49, KL50, KL69 and KL70 were higher than 2-fold of WT. KL70 was the highest, being 6-fold of WT. The supernatant to cell ratio was also calculated by using Actin-normalized Spike signal. Based on Actin-normalized spike signal in supernatant and cell, the supernatant to cell ratio of most mutants were within 1-3 fold of WT, except for KL50, KL69 and KL70. The actin-normalized supernatant to cell ratios of mutant KL50, KL69 and KL70 were higher than 3-fold. KL70 was the highest, being 8-fold of WT(wild type). Overall, KL49, KL50, KL69 and KL70 showed higher supernatant to cell ratio of spike protein, among them KL70 was the highest.

[0473] Concentration of spike protein in concentrated supernatant is noted in FIG. 46. Concentration of spike protein in cell lysate is illustrated in FIG. 47. Concentration of spike protein in cell lysate and supernatant is illustrated in FIG. 48. Supernatant-to-cell ratio of spike protein is illustrated in FIG. 49. Supernatant-to-cell ratio of spike protein normalized to actin and wild type is illustrated in FIG. 49.

### Summary of Example 11

[0474] A panel of SAM encoding antigen mutants, in both FL and Ecto forms as described above, with alternative signal sequences replacing the first 16 or 18 aa of the antigen, were generated. The FL antigens retained the membrane spanning region of the antigen and thus, if expressed correctly, would demonstrate surface expression. The Ecto forms lacked the membrane spanning region and thus, if expressed correctly, would be secreted. Screening of FL mutants by flow cytometry identified 5 mutants that show increased surface antigen expression: 1 having Gaussia luciferase (GLuc); 2 having Gaussia luciferase-AKP (GLuc-AKP); 2 having IgG light chain kappa (LCk). Screening of Ecto mutants by Western blot identified 3 mutants with enhanced secretion of antigen: 2 having Gaussia luciferase-AKP (GLuc-AKP); 1 having Gaussia luciferase (GLuc). Overall, the GLuc signal sequence, especially GLuc-AKP, was identified as strongly enhancing surface expression/secretion.

The application's sequence listing, which the Patent Office published only in electronic form, follows.

SEQUENCE LISTING (268 sequences)

SEQ ID NO: 1 - protein, 1273 aa, Severe acute respiratory syndrome coronavirus 2
MFVFLVLLPLVSSQCVNLTTRTQLPPAYTNSFTRGVYYPDKVFRSSVLHSTQDLFLPFFSNVTWFHAIHVSGTNGTKRFDNPVLPFNDGVYFASTEKSNIIRGWIFGTTLDSKTQSLLIVNNATNVVIKVCEFQFCNDPFLGVYYHKNNKSWMESEFRVYSSANNCTFEYVSQPFLMDLEGKQGNFKNLREFVFKNIDGYFKIYSKHTPINLVRDLPQGFSALEPLVDLPIGINITRFQTLLALHRSYLTPGDSSSGWTAGAAAYYVGYLQPRTFLLKYNENGTITDAVDCALDPLSETKCTLKSFTVEKGIYQTSNFRVQPTESIVRFPNITNLCPFGEVFNATRFASVYAWNRKRISNCVADYSVLYNSASFSTFKCYGVSPTKLNDLCFTNVYADSFVIRGDEVRQIAPGQTGKIADYNYKLPDDFTGCVIAWNSNNLDSKVGGNYNYLYRLFRKSNLKPFERDISTEIYQAGSTPCNGVEGFNCYFPLQSYGFQPTNGVGYQPYRVVVLSFELLHAPATVCGPKKSTNLVKNKCVNFNFNGLTGTGVLTESNKKFLPFQQFGRDIADTTDAVRDPQTLEILDITPCSFGGVSVITPGTNTSNQVAVLYQDVNCTEVPVAIHADQLTPTWRVYSTGSNVFQTRAGCLIGAEHVNNSYECDIPIGAGICASYQTQTNSPRRARSVASQSIIAYTMSLGAENSVAYSNNSIAIPTNFTISVTTEILPVSMTKTSVDCTMYICGDSTECSNLLLQYGSFCTQLNRALTGIAVEQDKNTQEVFAQVKQIYKTPPIKDFGGFNFSQILPDPSKPSKRSFIEDLLFNKVTLADAGFIKQYGDCLGDIAARDLICAQKFNGLTVLPPLLTDEMIAQYTSALLAGTITSGWTFGAGAALQIPFAMQMAYRFNGIGVTQNVLYENQKLIANQFNSAIGKIQDSLSSTASALGKLQDVVNQNAQALNTLVKQLSSNFGAISSVLNDILSRLDKVEAEVQIDRLITGRLQSLQTYVTQQLIRAAEIRASANLAATKMSECVLGQSKRVDFCGKGYHLMSFPQSAPHGVVFLHVTYVPAQEKNFTTAPAICHDGKAHFPREGVFVSNGTHWFVTQRNFYEPQIITTDNTFVSGNCDVVIGIVNNTVYDPLQPELDSFKEELDKYFKNHTSPDVDLGDISGINASVVNIQKEIDRLNEVAKNLNESLIDLQELGKYEQYIKWPWYIWLGFIAGLIAIVMVTIMLCCMTSCCSCLKGCCSCGSCCKFDEDDSEPVLKGVKLHYT

SEQ ID NO: 2 - protein, 18 aa, Gaussia princeps
  Gaussian Luciferase signal sequence
MGVKVLFALICIAVAEAK

SEQ ID NO: 3 - protein, 24 aa, Homo sapiens
  human CD5 signal sequence
MPMGSLQPLATLYLLGMLVASVLA

SEQ ID NO: 4 - protein, 16 aa, Homo sapiens
  human CD33 signal sequence
MPLLLLLPLLWAGAAA

SEQ ID NO: 5 - protein, 20 aa, Homo sapiens
  human IL2 signal sequence
MYRMQLLSCIALSLALVTNS

SEQ ID NO: 6 - protein, 18 aa, Homo sapiens
  human IgE signal sequence
MDWTWILFLVAAATRVHS

SEQ ID NO: 7 - protein, 20 aa, Homo sapiens
  human Light Chain Kappa signal sequence
METPAELLFLLLLWLPDTTG

SEQ ID NO: 8 - protein, 21 aa, Japanese encephalitis virus
  JEV short signal sequence
MNEGSIMWLASLAVVIACAGA

SEQ ID NO: 9 - protein, 30 aa, Japanese encephalitis virus
  JEV long signal sequence
MGRKQNKRGGNEGSIMWLASLAVVIACAGA

SEQ ID NO: 10 - protein, 21 aa, Mus musculus
  Mouse Light Chain Kappa signal sequence
METDTLLLWVLLLWVPGSTGD

SEQ ID NO: 11 - protein, 21 aa, Artificial Sequence
  Description of Artificial Sequence: Synthetic peptide
  SSP signal sequence
MRPTLLWSLLLLLGVFAAAAA

SEQ ID NO: 12 - protein, 19 aa, Gaussia princeps
  Gaussian Luciferase (AKP) signal sequence
MGVKVLFALICIAVAEAKP

SEQ ID NO: 13 - DNA, 54 bp, Gaussia princeps
  Gaussian Luciferase signal sequence
atgggtgttaaagtgcttttcgctcttatctgtatagctgtcgctgaggcaaag

SEQ ID NO: 14 - DNA, 72 bp, Homo sapiens
  human CD5 signal sequence
atgcctatgggctctctgcaaccccttgcaaccctttatttgttggggatgcttgtcgcgtccgtcctcgcg

SEQ ID NO: 15 - DNA, 48 bp, Homo sapiens
  human CD33 signal sequence
atgcccctcttgcttctcttgccactgctgtgggctggggcggcagct

SEQ ID NO: 16 - DNA, 60 bp, Homo sapiens
  human IL2 signal sequence
atgtaccgaatgcagctcttgtcctgcattgctctcagccttgcacttgtgaccaattcc

SEQ ID NO: 17 - DNA, 54 bp, Homo sapiens
  human IgE signal sequence
atggattggacgtggatactgttccttgtggctgcagccactcgcgttcactca

SEQ ID NO: 18 - DNA, 60 bp, Homo sapiens
  human Light Chain Kappa signal sequence
atggaaactcctgcggagttgctgttccttctgcttctttggctccctgatacaacggga

SEQ ID NO: 19 - DNA, 63 bp, Japanese encephalitis virus
  JEV short signal sequence
atgaacgaggggtccatcatgtggctcgcgtccttggccgttgtgattgcatgtgccggagct

SEQ ID NO: 20 - DNA, 90 bp, Japanese encephalitis virus
  JEV long signal sequence
atgggcaggaaacaaaacaaaaggggaggtaatgagggttccatcatgtggttggcttccctcgccgtggttattgcgtgcgctggtgct

SEQ ID NO: 21 - DNA, 63 bp, Mus musculus
  Mouse Light Chain Kappa signal sequence
atggaaactgatacactgttgctttgggtactcctcctctgggtccccggaagtacaggcgat

SEQ ID NO: 22 - DNA, 63 bp, Artificial Sequence
  Description of Artificial Sequence: Synthetic oligonucleotide
  SSP signal sequence
atgaggccgactctgctttggagtctgttgttgcttttgggtgtatttgctgcggcagcagcc

SEQ ID NO: 23 - DNA, 57 bp, Gaussia princeps
  Gaussian Luciferase (AKP) signal sequence
atgggtgttaaagtgttgtttgctttgatttgcattgcagtcgctgaagcaaaaccg

SEQ ID NO: 24 - protein, 29 aa, Artificial Sequence
  Description of Artificial Sequence: Synthetic peptide
  Foldon T4 trimer motif
GSGYIPEAPRDGQAYVRKDGEWVLLSTFL

SEQ ID NO: 25 - DNA, 87 bp, Artificial Sequence
  Description of Artificial Sequence: Synthetic oligonucleotide
  Foldon T4 trimer motif
gggagcggttatattcctgaagctccaagagatgggcaagcttacgttcgtaaagatggcgaatgggtacttctttctaccttttta

SEQ ID NO: 26 - protein, 1237 aa, Artificial Sequence
  Description of Artificial Sequence: Synthetic polypeptide
  pJW18
MFVFLVLLPLVSSQCVNLTTRTQLPPAYTNSFTRGVYYPDKVFRSSVLHSTQDLFLPFFSNVTWFHAIHVSGTNGTKRFDNPVLPFNDGVYFASTEKSNIIRGWIFGTTLDSKTQSLLIVNNATNVVIKVCEFQFCNDPFLGVYYHKNNKSWMESEFRVYSSANNCTFEYVSQPFLMDLEGKQGNFKNLREFVFKNIDGYFKIYSKHTPINLVRDLPQGFSALEPLVDLPIGINITRFQTLLALHRSYLTPGDSSSGWTAGAAAYYVGYLQPRTFLLKYNENGTITDAVDCALDPLSETKCTLKSFTVEKGIYQTSNFRVQPTESIVRFPNITNLCPFGEVFNATRFASVYAWNRKRISNCVADYSVLYNSASFSTFKCYGVSPTKLNDLCFTNVYADSFVIRGDEVRQIAPGQTGKIADYNYKLPDDFTGCVIAWNSNNLDSKVGGNYNYLYRLFRKSNLKPFERDISTEIYQAGSTPCNGVEGFNCYFPLQSYGFQPTNGVGYQPYRVVVLSFELLHAPATVCGPKKSTNLVKNKCVNFNFNGLTGTGVLTESNKKFLPFQQFGRDIADTTDAVRDPQTLEILDITPCSFGGVSVITPGTNTSNQVAVLYQDVNCTEVPVAIHADQLTPTWRVYSTGSNVFQTRAGCLIGAEHVNNSYECDIPIGAGICASYQTQTNSPGSASSVASQSIIAYTMSLGAENSVAYSNNSIAIPTNFTISVTTEILPVSMTKTSVDCTMYICGDSTECSNLLLQYGSFCTQLNRALTGIAVEQDKNTQEVFAQVKQIYKTPPIKDFGGFNFSQILPDPSKPSKRSFIEDLLFNKVTLADAGFIKQYGDCLGDIAARDLICAQKFNGLTVLPPLLTDEMIAQYTSALLAGTITSGWTFGAGAALQIPFAMQMAYRFNGIGVTQNVLYENQKLIANQFNSAIGKIQDSLSSTASALGKLQDVVNQNAQALNTLVKQLSSNFGAISSVLNDILSRLDPPEAEVQIDRLITGRLQSLQTYVTQQLIRAAEIRASANLAATKMSECVLGQSKRVDFCGKGYHLMSFPQSAPHGVVFLHVTYVPAQEKNFTTAPAICHDGKAHFPREGVFVSNGTHWFVTQRNFYEPQIITTDNTFVSGNCDVVIGIVNNTVYDPLQPELDSFKEELDKYFKNHTSPDVDLGDISGINASVVNIQKEIDRLNEVAKNLNESLIDLQELGKYEQGSGYIPEAPRDGQAYVRKDGEWVLLSTFL

SEQ ID NO: 27 - protein, 1239 aa, Artificial Sequence
  Description of Artificial Sequence: Synthetic polypeptide
  pKL049
MGVKVLFALICIAVAEAKNLTTRTQLPPAYTNSFTRGVYYPDKVFRSSVLHSTQDLFLPFFSNVTWFHAIHVSGTNGTKRFDNPVLPFNDGVYFASTEKSNIIRGWIFGTTLDSKTQSLLIVNNATNVVIKVCEFQFCNDPFLGVYYHKNNKSWMESEFRVYSSANNCTFEYVSQPFLMDLEGKQGNFKNLREFVFKNIDGYFKIYSKHTPINLVRDLPQGFSALEPLVDLPIGINITRFQTLLALHRSYLTPGDSSSGWTAGAAAYYVGYLQPRTFLLKYNENGTITDAVDCALDPLSETKCTLKSFTVEKGIYQTSNFRVQPTESIVRFPNITNLCPFGEVFNATRFASVYAWNRKRISNCVADYSVLYNSASFSTFKCYGVSPTKLNDLCFTNVYADSFVIRGDEVRQIAPGQTGKIADYNYKLPDDFTGCVIAWNSNNLDSKVGGNYNYLYRLFRKSNLKPFERDISTEIYQAGSTPCNGVEGFNCYFPLQSYGFQPTNGVGYQPYRVVVLSFELLHAPATVCGPKKSTNLVKNKCVNFNFNGLTGTGVLTESNKKFLPFQQFGRDIADTTDAVRDPQTLEILDITPCSFGGVSVITPGTNTSNQVAVLYQDVNCTEVPVAIHADQLTPTWRVYSTGSNVFQTRAGCLIGAEHVNNSYECDIPIGAGICASYQTQTNSPGSASSVASQSIIAYTMSLGAENSVAYSNNSIAIPTNFTISVTTEILPVSMTKTSVDCTMYICGDSTECSNLLLQYGSFCTQLNRALTGIAVEQDKNTQEVFAQVKQIYKTPPIKDFGGFNFSQILPDPSKPSKRSFIEDLLFNKVTLADAGFIKQYGDCLGDIAARDLICAQKFNGLTVLPPLLTDEMIAQYTSALLAGTITSGWTFGAGAALQIPFAMQMAYRFNGIGVTQNVLYENQKLIANQFNSAIGKIQDSLSSTASALGKLQDVVNQNAQALNTLVKQLSSNFGAISSVLNDILSRLDPPEAEVQIDRLITGRLQSLQTYVTQQLIRAAEIRASANLAATKMSECVLGQSKRVDFCGKGYHLMSFPQSAPHGVVFLHVTYVPAQEKNFTTAPAICHDGKAHFPREGVFVSNGTHWFVTQRNFYEPQIITTDNTFVSGNCDVVIGIVNNTVYDPLQPELDSFKEELDKYFKNHTSPDVDLGDISGINASVVNIQKEIDRLNEVAKNLNESLIDLQELGKYEQGSGYIPEAPRDGQAYVRKDGEWVLLSTFL

SEQ ID NO: 28 - protein, 1237 aa, Artificial Sequence
  Description of Artificial Sequence: Synthetic polypeptide
  pKL050
MGVKVLFALICIAVAEAKTTRTQLPPAYTNSFTRGVYYPDKVFRSSVLHSTQDLFLPFFSNVTWFHAIHVSGTNGTKRFDNPVLPFNDGVYFASTEKSNIIRGWIFGTTLDSKTQSLLIVNNATNVVIKVCEFQFCNDPFLGVYYHKNNKSWMESEFRVYSSANNCTFEYVSQPFLMDLEGKQGNFKNLREFVFKNIDGYFKIYSKHTPINLVRDLPQGFSALEPLVDLPIGINITRFQTLLALHRSYLTPGDSSSGWTAGAAAYYVGYLQPRTFLLKYNENGTITDAVDCALDPLSETKCTLKSFTVEKGIYQTSNFRVQPTESIVRFPNITNLCPFGEVFNATRFASVYAWNRKRISNCVADYSVLYNSASFSTFKCYGVSPTKLNDLCFTNVYADSFVIRGDEVRQIAPGQTGKIADYNYKLPDDFTGCVIAWNSNNLDSKVGGNYNYLYRLFRKSNLKPFERDISTEIYQAGSTPCNGVEGFNCYFPLQSYGFQPTNGVGYQPYRVVVLSFELLHAPATVCGPKKSTNLVKNKCVNFNFNGLTGTGVLTESNKKFLPFQQFGRDIADTTDAVRDPQTLEILDITPCSFGGVSVITPGTNTSNQVAVLYQDVNCTEVPVAIHADQLTPTWRVYSTGSNVFQTRAGCLIGAEHVNNSYECDIPIGAGICASYQTQTNSPGSASSVASQSIIAYTMSLGAENSVAYSNNSIAIPTNFTISVTTEILPVSMTKTSVDCTMYICGDSTECSNLLLQYGSFCTQLNRALTGIAVEQDKNTQEVFAQVKQIYKTPPIKDFGGFNFSQILPDPSKPSKRSFIEDLLFNKVTLADAGFIKQYGDCLGDIAARDLICAQKFNGLTVLPPLLTDEMIAQYTSALLAGTITSGWTFGAGAALQIPFAMQMAYRFNGIGVTQNVLYENQKLIANQFNSAIGKIQDSLSSTASALGKLQDVVNQNAQALNTLVKQLSSNFGAISSVLNDILSRLDPPEAEVQIDRLITGRLQSLQTYVTQQLIRAAEIRASANLAATKMSECVLGQSKRVDFCGKGYHLMSFPQSAPHGVVFLHVTYVPAQEKNFTTAPAICHDGKAHFPREGVFVSNGTHWFVTQRNFYEPQIITTDNTFVSGNCDVVIGIVNNTVYDPLQPELDSFKEELDKYFKNHTSPDVDLGDISGINASVVNIQKEIDRLNEVAKNLNESLIDLQELGKYEQGSGYIPEAPRDGQAYVRKDGEWVLLSTFL

SEQ ID NO: 29 - protein, 1245 aa, Artificial Sequence
  Description of Artificial Sequence: Synthetic polypeptide
  pKL051
MPMGSLQPLATLYLLGMLVASVLANLTTRTQLPPAYTNSFTRGVYYPDKVFRSSVLHSTQDLFLPFFSNVTWFHAIHVSGTNGTKRFDNPVLPFNDGVYFASTEKSNIIRGWIFGTTLDSKTQSLLIVNNATNVVIKVCEFQFCNDPFLGVYYHKNNKSWMESEFRVYSSANNCTFEYVSQPFLMDLEGKQGNFKNLREFVFKNIDGYFKIYSKHTPINLVRDLPQGFSALEPLVDLPIGINITRFQTLLALHRSYLTPGDSSSGWTAGAAAYYVGYLQPRTFLLKYNENGTITDAVDCALDPLSETKCTLKSFTVEKGIYQTSNFRVQPTESIVRFPNITNLCPFGEVFNATRFASVYAWNRKRISNCVADYSVLYNSASFSTFKCYGVSPTKLNDLCFTNVYADSFVIRGDEVRQIAPGQTGKIADYNYKLPDDFTGCVIAWNSNNLDSKVGGNYNYLYRLFRKSNLKPFERDISTEIYQAGSTPCNGVEGFNCYFPLQSYGFQPTNGVGYQPYRVVVLSFELLHAPATVCGPKKSTNLVKNKCVNFNFNGLTGTGVLTESNKKFLPFQQFGRDIADTTDAVRDPQTLEILDITPCSFGGVSVITPGTNTSNQVAVLYQDVNCTEVPVAIHADQLTPTWRVYSTGSNVFQTRAGCLIGAEHVNNSYECDIPIGAGICASYQTQTNSPGSASSVASQSIIAYTMSLGAENSVAYSNNSIAIPTNFTISVTTEILPVSMTKTSVDCTMYICGDSTECSNLLLQYGSFCTQLNRALTGIAVEQDKNTQEVFAQVKQIYKTPPIKDFGGFNFSQILPDPSKPSKRSFIEDLLFNKVTLADAGFIKQYGDCLGDIAARDLICAQKFNGLTVLPPLLTDEMIAQYTSALLAGTITSGWTFGAGAALQIPFAMQMAYRFNGIGVTQNVLYENQKLIANQFNSAIGKIQDSLSSTASALGKLQDVVNQNAQALNTLVKQLSSNFGAISSVLNDILSRLDPPEAEVQIDRLITGRLQSLQTYVTQQLIRAAEIRASANLAATKMSECVLGQSKRVDFCGKGYHLMSFPQSAPHGVVFLHVTYVPAQEKNFTTAPAICHDGKAHFPREGVFVSNGTHWFVTQRNFYEPQIITTDNTFVSGNCDVVIGIVNNTVYDPLQPELDSFKEELDKYFKNHTSPDVDLGDISGINASVVNIQKEIDRLNEVAKNLNESLIDLQELGKYEQGSGYIPEAPRDGQAYVRKDGEWVLLSTFL

SEQ ID NO: 30 - protein, 1243 aa, Artificial Sequence
  Description of Artificial Sequence: Synthetic polypeptide
  pKL052
MPMGSLQPLATLYLLGMLVASVLATTRTQLPPAYTNSFTRGVYYPDKVFRSSVLHSTQDLFLPFFSNVTWFHAIHVSGTNGTKRFDNPVLPFNDGVYFASTEKSNIIRGWIFGTTLDSKTQSLLIVNNATNVVIKVCEFQFCNDPFLGVYYHKNNKSWMESEFRVYSSANNCTFEYVSQPFLMDLEGKQGNFKNLREFVFKNIDGYFKIYSKHTPINLVRDLPQGFSALEPLVDLPIGINITRFQTLLALHRSYLTPGDSSSGWTAGAAAYYVGYLQPRTFLLKYNENGTITDAVDCALDPLSETKCTLKSFTVEKGIYQTSNFRVQPTESIVRFPNITNLCPFGEVFNATRFASVYAWNRKRISNCVADYSVLYNSASFSTFKCYGVSPTKLNDLCFTNVYADSFVIRGDEVRQIAPGQTGKIADYNYKLPDDFTGCVIAWNSNNLDSKVGGNYNYLYRLFRKSNLKPFERDISTEIYQAGSTPCNGVEGFNCYFPLQSYGFQPTNGVGYQPYRVVVLSFELLHAPATVCGPKKSTNLVKNKCVNFNFNGLTGTGVLTESNKKFLPFQQFGRDIADTTDAVRDPQTLEILDITPCSFGGVSVITPGTNTSNQVAVLYQDVNCTEVPVAIHADQLTPTWRVYSTGSNVFQTRAGCLIGAEHVNNSYECDIPIGAGICASYQTQTNSPGSASSVASQSIIAYTMSLGAENSVAYSNNSIAIPTNFTISVTTEILPVSMTKTSVDCTMYICGDSTECSNLLLQYGSFCTQLNRALTGIAVEQDKNTQEVFAQVKQIYKTPPIKDFGGFNFSQILPDPSKPSKRSFIEDLLFNKVTLADAGFIKQYGDCLGDIAARDLICAQKFNGLTVLPPLLTDEMIAQYTSALLAGTITSGWTFGAGAALQIPFAMQMAYRFNGIGVTQNVLYENQKLIANQFNSAIGKIQDSLSSTASALGKLQDVVNQNAQALNTLVKQLSSNFGAISSVLNDILSRLDPPEAEVQIDRLITGRLQSLQTYVTQQLIRAAEIRASANLAATKMSECVLGQSKRVDFCGKGYHLMSFPQSAPHGVVFLHVTYVPAQEKNFTTAPAICHDGKAHFPREGVFVSNGTHWFVTQRNFYEPQIITTDNTFVSGNCDVVIGIVNNTVYDPLQPELDSFKEELDKYFKNHTSPDVDLGDISGINASVVNIQKEIDRLNEVAKNLNESLIDLQELGKYEQGSGYIPEAPRDGQAYVRKDGEWVLLSTFL

SEQ ID NO: 31 - protein, 1237 aa, Artificial Sequence
  Description of Artificial Sequence: Synthetic polypeptide
  pKL053
MPLLLLLPLLWAGAAANLTTRTQLPPAYTNSFTRGVYYPDKVFRSSVLHSTQDLFLPFFSNVTWFHAIHVSGTNGTKRFDNPVLPFNDGVYFASTEKSNIIRGWIFGTTLDSKTQSLLIVNNATNVVIKVCEFQFCNDPFLGVYYHKNNKSWMESEFRVYSSANNCTFEYVSQPFLMDLEGKQGNFKNLREFVFKNIDGYFKIYSKHTPINLVRDLPQGFSALEPLVDLPIGINITRFQTLLALHRSYLTPGDSSSGWTAGAAAYYVGYLQPRTFLLKYNENGTITDAVDCALDPLSETKCTLKSFTVEKGIYQTSNFRVQPTESIVRFPNITNLCPFGEVFNATRFASVYAWNRKRISNCVADYSVLYNSASFSTFKCYGVSPTKLNDLCFTNVYADSFVIRGDEVRQIAPGQTGKIADYNYKLPDDFTGCVIAWNSNNLDSKVGGNYNYLYRLFRKSNLKPFERDISTEIYQAGSTPCNGVEGFNCYFPLQSYGFQPTNGVGYQPYRVVVLSFELLHAPATVCGPKKSTNLVKNKCVNFNFNGLTGTGVLTESNKKFLPFQQFGRDIADTTDAVRDPQTLEILDITPCSFGGVSVITPGTNTSNQVAVLYQDVNCTEVPVAIHADQLTPTWRVYSTGSNVFQTRAGCLIGAEHVNNSYECDIPIGAGICASYQTQTNSPGSASSVASQSIIAYTMSLGAENSVAYSNNSIAIPTNFTISVTTEILPVSMTKTSVDCTMYICGDSTECSNLLLQYGSFCTQLNRALTGIAVEQDKNTQEVFAQVKQIYKTPPIKDFGGFNFSQILPDPSKPSKRSFIEDLLFNKVTLADAGFIKQYGDCLGDIAARDLICAQKFNGLTVLPPLLTDEMIAQYTSALLAGTITSGWTFGAGAALQIPFAMQMAYRFNGIGVTQNVLYENQKLIANQFNSAIGKIQDSLSSTASALGKLQDVVNQNAQALNTLVKQLSSNFGAISSVLNDILSRLDPPEAEVQIDRLITGRLQSLQTYVTQQLIRAAEIRASANLAATKMSECVLGQSKRVDFCGKGYHLMSFPQSAPHGVVFLHVTYVPAQEKNFTTAPAICHDGKAHFPREGVFVSNGTHWFVTQRNFYEPQIITTDNTFVSGNCDVVIGIVNNTVYDPLQPELDSFKEELDKYFKNHTSPDVDLGDISGINASVVNIQKEIDRLNEVAKNLNESLIDLQELGKYEQGSGYIPEAPRDGQAYVRKDGEWVLLSTFL

SEQ ID NO: 32 - protein, 1235 aa, Artificial Sequence
  Description of Artificial Sequence: Synthetic polypeptide
  pKL054
MPLLLLLPLLWAGAAATTRTQLPPAYTNSFTRGVYYPDKVFRSSVLHSTQDLFLPFFSNVTWFHAIHVSGTNGTKRFDNPVLPFNDGVYFASTEKSNIIRGWIFGTTLDSKTQSLLIVNNATNVVIKVCEFQFCNDPFLGVYYHKNNKSWMESEFRVYSSANNCTFEYVSQPFLMDLEGKQGNFKNLREFVFKNIDGYFKIYSKHTPINLVRDLPQGFSALEPLVDLPIGINITRFQTLLALHRSYLTPGDSSSGWTAGAAAYYVGYLQPRTFLLKYNENGTITDAVDCALDPLSETKCTLKSFTVEKGIYQTSNFRVQPTESIVRFPNITNLCPFGEVFNATRFASVYAWNRKRISNCVADYSVLYNSASFSTFKCYGVSPTKLNDLCFTNVYADSFVIRGDEVRQIAPGQTGKIADYNYKLPDDFTGCVIAWNSNNLDSKVGGNYNYLYRLFRKSNLKPFERDISTEIYQAGSTPCNGVEGFNCYFPLQSYGFQPTNGVGYQPYRVVVLSFELLHAPATVCGPKKSTNLVKNKCVNFNFNGLTGTGVLTESNKKFLPFQQFGRDIADTTDAVRDPQTLEILDITPCSFGGVSVITPGTNTSNQVAVLYQDVNCTEVPVAIHADQLTPTWRVYSTGSNVFQTRAGCLIGAEHVNNSYECDIPIGAGICASYQTQTNSPGSASSVASQSIIAYTMSLGAENSVAYSNNSIAIPTNFTISVTTEILPVSMTKTSVDCTMYICGDSTECSNLLLQYGSFCTQLNRALTGIAVEQDKNTQEVFAQVKQIYKTPPIKDFGGFNFSQILPDPSKPSKRSFIEDLLFNKVTLADAGFIKQYGDCLGDIAARDLICAQKFNGLTVLPPLLTDEMIAQYTSALLAGTITSGWTFGAGAALQIPFAMQMAYRFNGIGVTQNVLYENQKLIANQFNSAIGKIQDSLSSTASALGKLQDVVNQNAQALNTLVKQLSSNFGAISSVLNDILSRLDPPEAEVQIDRLITGRLQSLQTYVTQQLIRAAEIRASANLAATKMSECVLGQSKRVDFCGKGYHLMSFPQSAPHGVVFLHVTYVPAQEKNFTTAPAICHDGKAHFPREGVFVSNGTHWFVTQRNFYEPQIITTDNTFVSGNCDVVIGIVNNTVYDPLQPELDSFKEELDKYFKNHTSPDVDLGDISGINASVVNIQKEIDRLNEVAKNLNESLIDLQELGKYEQGSGYIPEAPRDGQAYVRKDGEWVLLSTFL

SEQ ID NO: 33 - protein, 1241 aa, Artificial Sequence
  Description of Artificial Sequence: Synthetic polypeptide
  pKL055
MYRMQLLSCIALSLALVTNSNLTTRTQLPPAYTNSFTRGVYYPDKVFRSSVLHSTQDLFLPFFSNVTWFHAIHVSGTNGTKRFDNPVLPFNDGVYFASTEKSNIIRGWIFGTTLDSKTQSLLIVNNATNVVIKVCEFQFCNDPFLGVYYHKNNKSWMESEFRVYSSANNCTFEYVSQPFLMDLEGKQGNFKNLREFVFKNIDGYFKIYSKHTPINLVRDLPQGFSALEPLVDLPIGINITRFQTLLALHRSYLTPGDSSSGWTAGAAAYYVGYLQPRTFLLKYNENGTITDAVDCALDPLSETKCTLKSFTVEKGIYQTSNFRVQPTESIVRFPNITNLCPFGEVFNATRFASVYAWNRKRISNCVADYSVLYNSASFSTFKCYGVSPTKLNDLCFTNVYADSFVIRGDEVRQIAPGQTGKIADYNYKLPDDFTGCVIAWNSNNLDSKVGGNYNYLYRLFRKSNLKPFERDISTEIYQAGSTPCNGVEGFNCYFPLQSYGFQPTNGVGYQPYRVVVLSFELLHAPATVCGPKKSTNLVKNKCVNFNFNGLTGTGVLTESNKKFLPFQQFGRDIADTTDAVRDPQTLEILDITPCSFGGVSVITPGTNTSNQVAVLYQDVNCTEVPVAIHADQLTPTWRVYSTGSNVFQTRAGCLIGAEHVNNSYECDIPIGAGICASYQTQTNSPGSASSVASQSIIAYTMSLGAENSVAYSNNSIAIPTNFTISVTTEILPVSMTKTSVDCTMYICGDSTECSNLLLQYGSFCTQLNRALTGIAVEQDKNTQEVFAQVKQIYKTPPIKDFGGFNFSQILPDPSKPSKRSFIEDLLFNKVTLADAGFIKQYGDCLGDIAARDLICAQKFNGLTVLPPLLTDEMIAQYTSALLAGTITSGWTFGAGAALQIPFAMQMAYRFNGIGVTQNVLYENQKLIANQFNSAIGKIQDSLSSTASALGKLQDVVNQNAQALNTLVKQLSSNFGAISSVLNDILSRLDPPEAEVQIDRLITGRLQSLQTYVTQQLIRAAEIRASANLAATKMSECVLGQSKRVDFCGKGYHLMSFPQSAPHGVVFLHVTYVPAQEKNFTTAPAICHDGKAHFPREGVFVSNGTHWFVTQRNFYEPQIITTDNTFVSGNCDVVIGIVNNTVYDPLQPELDSFKEELDKYFKNHTSPDVDLGDISGINASVVNIQKEIDRLNEVAKNLNESLIDLQELGKYEQGSGYIPEAPRDGQAYVRKDGEWVLLSTFL

SEQ ID NO: 34 - protein, 1239 aa, Artificial Sequence
  Description of Artificial Sequence: Synthetic polypeptide
  pKL056
MYRMQLLSCIALSLALVTNSTTRTQLPPAYTNSFTRGVYYPDKVFRSSVLHSTQDLFLPFFSNVTWFHAIHVSGTNGTKRFDNPVLPFNDGVYFASTEKSNIIRGWIFGTTLDSKTQSLLIVNNATNVVIKVCEFQFCNDPFLGVYYHKNNKSWMESEFRVYSSANNCTFEYVSQPFLMDLEGKQGNFKNLREFVFKNIDGYFKIYSKHTPINLVRDLPQGFSALEPLVDLPIGINITRFQTLLALHRSYLTPGDSSSGWTAGAAAYYVGYLQPRTFLLKYNENGTITDAVDCALDPLSETKCTLKSFTVEKGIYQTSNFRVQPTESIVRFPNITNLCPFGEVFNATRFASVYAWNRKRISNCVADYSVLYNSASFSTFKCYGVSPTKLNDLCFTNVYADSFVIRGDEVRQIAPGQTGKIADYNYKLPDDFTGCVIAWNSNNLDSKVGGNYNYLYRLFRKSNLKPFERDISTEIYQAGSTPCNGVEGFNCYFPLQSYGFQPTNGVGYQPYRVVVLSFELLHAPATVCGPKKSTNLVKNKCVNFNFNGLTGTGVLTESNKKFLPFQQFGRDIADTTDAVRDPQTLEILDITPCSFGGVSVITPGTNTSNQVAVLYQDVNCTEVPVAIHADQLTPTWRVYSTGSNVFQTRAGCLIGAEHVNNSYECDIPIGAGICASYQTQTNSPGSASSVASQSIIAYTMSLGAENSVAYSNNSIAIPTNFTISVTTEILPVSMTKTSVDCTMYICGDSTECSNLLLQYGSFCTQLNRALTGIAVEQDKNTQEVFAQVKQIYKTPPIKDFGGFNFSQILPDPSKPSKRSFIEDLLFNKVTLADAGFIKQYGDCLGDIAARDLICAQKFNGLTVLPPLLTDEMIAQYTSALLAGTITSGWTFGAGAALQIPFAMQMAYRFNGIGVTQNVLYENQKLIANQFNSAIGKIQDSLSSTASALGKLQDVVNQNAQALNTLVKQLSSNFGAISSVLNDILSRLDPPEAEVQIDRLITGRLQSLQTYVTQQLIRAAEIRASANLAATKMSECVLGQSKRVDFCGKGYHLMSFPQSAPHGVVFLHVTYVPAQEKNFTTAPAICHDGKAHFPREGVFVSNGTHWFVTQRNFYEPQIITTDNTFVSGNCDVVIGIVNNTVYDPLQPELDSFKEELDKYFKNHTSPDVDLGDISGINASVVNIQKEIDRLNEVAKNLNESLIDLQELGKYEQGSGYIPEAPRDGQAYVRKDGEWVLLSTFL

SEQ ID NO: 35 - protein, 1239 aa, Artificial Sequence
  Description of Artificial Sequence: Synthetic polypeptide
  pKL057
MDWTWILFLVAAATRVHSNLTTRTQLPPAYTNSFTRGVYYPDKVFRSSVLHSTQDLFLPFFSNVTWFHAIHVSGTNGTKRFDNPVLPFNDGVYFASTEKSNIIRGWIFGTTLDSKTQSLLIVNNATNVVIKVCEFQFCNDPFLGVYYHKNNKSWMESEFRVYSSANNCTFEYVSQPFLMDLEGKQGNFKNLREFVFKNIDGYFKIYSKHTPINLVRDLPQGFSALEPLVDLPIGINITRFQTLLALHRSYLTPGDSSSGWTAGAAAYYVGYLQPRTFLLKYNENGTITDAVDCALDPLSETKCTLKSFTVEKGIYQTSNFRVQPTESIVRFPNITNLCPFGEVFNATRFASVYAWNRKRISNCVADYSVLYNSASFSTFKCYGVSPTKLNDLCFTNVYADSFVIRGDEVRQIAPGQTGKIADYNYKLPDDFTGCVIAWNSNNLDSKVGGNYNYLYRLFRKSNLKPFERDISTEIYQAGSTPCNGVEGFNCYFPLQSYGFQPTNGVGYQPYRVVVLSFELLHAPATVCGPKKSTNLVKNKCVNFNFNGLTGTGVLTESNKKFLPFQQFGRDIADTTDAVRDPQTLEILDITPCSFGGVSVITPGTNTSNQVAVLYQDVNCTEVPVAIHADQLTPTWRVYSTGSNVFQTRAGCLIGAEHVNNSYECDIPIGAGICASYQTQTNSPGSASSVASQSIIAYTMSLGAENSVAYSNNSIAIPTNFTISVTTEILPVSMTKTSVDCTMYICGDSTECSNLLLQYGSFCTQLNRALTGIAVEQDKNTQEVFAQVKQIYKTPPIKDFGGFNFSQILPDPSKPSKRSFIEDLLFNKVTLADAGFIKQYGDCLGDIAARDLICAQKFNGLTVLPPLLTDEMIAQYTSALLAGTITSGWTFGAGAALQIPFAMQMAYRFNGIGVTQNVLYENQKLIANQFNSAIGKIQDSLSSTASALGKLQDVVNQNAQALNTLVKQLSSNFGAISSVLNDILSRLDPPEAEVQIDRLITGRLQSLQTYVTQQLIRAAEIRASANLAATKMSECVLGQSKRVDFCGKGYHLMSFPQSAPHGVVFLHVTYVPAQEKNFTTAPAICHDGKAHFPREGVFVSNGTHWFVTQRNFYEPQIITTDNTFVSGNCDVVIGIVNNTVYDPLQPELDSFKEELDKYFKNHTSPDVDLGDISGINASVVNIQKEIDRLNEVAKNLNESLIDLQELGKYEQGSGYIPEAPRDGQAYVRKDGEWVLLSTFL

SEQ ID NO: 36 - protein, 1237 aa, Artificial Sequence
  Description of Artificial Sequence: Synthetic polypeptide
  pKL058
MDWTWILFLVAAATRVHSTTRTQLPPAYTNSFTRGVYYPDKVFRSSVLHSTQDLFLPFFSNVTWFHAIHVSGTNGTKRFDNPVLPFNDGVYFASTEKSNIIRGWIFGTTLDSKTQSLLIVNNATNVVIKVCEFQFCNDPFLGVYYHKNNKSWMESEFRVYSSANNCTFEYVSQPFLMDLEGKQGNFKNLREFVFKNIDGYFKIYSKHTPINLVRDLPQGFSALEPLVDLPIGINITRFQTLLALHRSYLTPGDSSSGWTAGAAAYYVGYLQPRTFLLKYNENGTITDAVDCALDPLSETKCTLKSFTVEKGIYQTSNFRVQPTESIVRFPNITNLCPFGEVFNATRFASVYAWNRKRISNCVADYSVLYNSASFSTFKCYGVSPTKLNDLCFTNVYADSFVIRGDEVRQIAPGQTGKIADYNYKLPDDFTGCVIAWNSNNLDSKVGGNYNYLYRLFRKSNLKPFERDISTEIYQAGSTPCNGVEGFNCYFPLQSYGFQPTNGVGYQPYRVVVLSFELLHAPATVCGPKKSTNLVKNKCVNFNFNGLTGTGVLTESNKKFLPFQQFGRDIADTTDAVRDPQTLEILDITPCSFGGVSVITPGTNTSNQVAVLYQDVNCTEVPVAIHADQLTPTWRVYSTGSNVFQTRAGCLIGAEHVNNSYECDIPIGAGICASYQTQTNSPGSASSVASQSIIAYTMSLGAENSVAYSNNSIAIPTNFTISVTTEILPVSMTKTSVDCTMYICGDSTECSNLLLQYGSFCTQLNRALTGIAVEQDKNTQEVFAQVKQIYKTPPIKDFGGFNFSQILPDPSKPSKRSFIEDLLFNKVTLADAGFIKQYGDCLGDIAARDLICAQKFNGLTVLPPLLTDEMIAQYTSALLAGTITSGWTFGAGAALQIPFAMQMAYRFNGIGVTQNVLYENQKLIANQFNSAIGKIQDSLSSTASALGKLQDVVNQNAQALNTLVKQLSSNFGAISSVLNDILSRLDPPEAEVQIDRLITGRLQSLQTYVTQQLIRAAEIRASANLAATKMSECVLGQSKRVDFCGKGYHLMSFPQSAPHGVVFLHVTYVPAQEKNFTTAPAICHDGKAHFPREGVFVSNGTHWFVTQRNFYEPQIITTDNTFVSGNCDVVIGIVNNTVYDPLQPELDSFKEELDKYFKNHTSPDVDLGDISGINASVVNIQKEIDRLNEVAKNLNESLIDLQELGKYEQGSGYIPEAPRDGQAYVRKDGEWVLLSTFL

SEQ ID NO: 37 - protein, 1241 aa, Artificial Sequence
  Description of Artificial Sequence: Synthetic polypeptide
  pKL059
METPAELLFLLLLWLPDTTGNLTTRTQLPPAYTNSFTRGVYYPDKVFRSSVLHSTQDLFLPFFSNVTWFHAIHVSGTNGTKRFDNPVLPFNDGVYFASTEKSNIIRGWIFGTTLDSKTQSLLIVNNATNVVIKVCEFQFCNDPFLGVYYHKNNKSWMESEFRVYSSANNCTFEYVSQPFLMDLEGKQGNFKNLREFVFKNIDGYFKIYSKHTPINLVRDLPQGFSALEPLVDLPIGINITRFQTLLALHRSYLTPGDSSSGWTAGAAAYYVGYLQPRTFLLKYNENGTITDAVDCALDPLSETKCTLKSFTVEKGIYQTSNFRVQPTESIVRFPNITNLCPFGEVFNATRFASVYAWNRKRISNCVADYSVLYNSASFSTFKCYGVSPTKLNDLCFTNVYADSFVIRGDEVRQIAPGQTGKIADYNYKLPDDFTGCVIAWNSNNLDSKVGGNYNYLYRLFRKSNLKPFERDISTEIYQAGSTPCNGVEGFNCYFPLQSYGFQPTNGVGYQPYRVVVLSFELLHAPATVCGPKKSTNLVKNKCVNFNFNGLTGTGVLTESNKKFLPFQQFGRDIADTTDAVRDPQTLEILDITPCSFGGVSVITPGTNTSNQVAVLYQDVNCTEVPVAIHADQLTPTWRVYSTGSNVFQTRAGCLIGAEHVNNSYECDIPIGAGICASYQTQTNSPGSASSVASQSIIAYTMSLGAENSVAYSNNSIAIPTNFTISVTTEILPVSMTKTSVDCTMYICGDSTECSNLLLQYGSFCTQLNRALTGIAVEQDKNTQEVFAQVKQIYKTPPIKDFGGFNFSQILPDPSKPSKRSFIEDLLFNKVTLADAGFIKQYGDCLGDIAARDLICAQKFNGLTVLPPLLTDEMIAQYTSALLAGTITSGWTFGAGAALQIPFAMQMAYRFNGIGVTQNVLYENQKLIANQFNSAIGKIQDSLSSTASALGKLQDVVNQNAQALNTLVKQLSSNFGAISSVLNDILSRLDPPEAEVQIDRLITGRLQSLQTYVTQQLIRAAEIRASANLAATKMSECVLGQSKRVDFCGKGYHLMSFPQSAPHGVVFLHVTYVPAQEKNFTTAPAICHDGKAHFPREGVFVSNGTHWFVTQRNFYEPQIITTDNTFVSGNCDVVIGIVNNTVYDPLQPELDSFKEELDKYFKNHTSPDVDLGDISGINASVVNIQKEIDRLNEVAKNLNESLIDLQELGKYEQGSGYIPEAPRDGQAYVRKDGEWVLLSTFL

SEQ ID NO: 38 - protein, 1239 aa, Artificial Sequence
  Description of Artificial Sequence: Synthetic polypeptide
  pKL060
METPAELLFLLLLWLPDTTGTTRTQLPPAYTNSFTRGVYYPDKVFRSSVLHSTQDLFLPFFSNVTWFHAIHVSGTNGTKRFDNPVLPFNDGVYFASTEKSNIIRGWIFGTTLDSKTQSLLIVNNATNVVIKVCEFQFCNDPFLGVYYHKNNKSWMESEFRVYSSANNCTFEYVSQPFLMDLEGKQGNFKNLREFVFKNIDGYFKIYSKHTPINLVRDLPQGFSALEPLVDLPIGINITRFQTLLALHRSYLTPGDSSSGWTAGAAAYYVGYLQPRTFLLKYNENGTITDAVDCALDPLSETKCTLKSFTVEKGIYQTSNFRVQPTESIVRFPNITNLCPFGEVFNATRFASVYAWNRKRISNCVADYSVLYNSASFSTFKCYGVSPTKLNDLCFTNVYADSFVIRGDEVRQIAPGQTGKIADYNYKLPDDFTGCVIAWNSNNLDSKVGGNYNYLYRLFRKSNLKPFERDISTEIYQAGSTPCNGVEGFNCYFPLQSYGFQPTNGVGYQPYRVVVLSFELLHAPATVCGPKKSTNLVKNKCVNFNFNGLTGTGVLTESNKKFLPFQQFGRDIADTTDAVRDPQTLEILDITPCSFGGVSVITPGTNTSNQVAVLYQDVNCTEVPVAIHADQLTPTWRVYSTGSNVFQTRAGCLIGAEHVNNSYECDIPIGAGICASYQTQTNSPGSASSVASQSIIAYTMSLGAENSVAYSNNSIAIPTNFTISVTTEILPVSMTKTSVDCTMYICGDSTECSNLLLQYGSFCTQLNRALTGIAVEQDKNTQEVFAQVKQIYKTPPIKDFGGFNFSQILPDPSKPSKRSFIEDLLFNKVTLADAGFIKQYGDCLGDIAARDLICAQKFNGLTVLPPLLTDEMIAQYTSALLAGTITSGWTFGAGAALQIPFAMQMAYRFNGIGVTQNVLYENQKLIANQFNSAIGKIQDSLSSTASALGKLQDVVNQNAQALNTLVKQLSSNFGAISSVLNDILSRLDPPEAEVQIDRLITGRLQSLQTYVTQQLIRAAEIRASANLAATKMSECVLGQSKRVDFCGKGYHLMSFPQSAPHGVVFLHVTYVPAQEKNFTTAPAICHDGKAHFPREGVFVSNGTHWFVTQRNFYEPQIITTDNTFVSGNCDVVIGIVNNTVYDPLQPELDSFKEELDKYFKNHTSPDVDLGDISGINASVVNIQKEIDRLNEVAKNLNESLIDLQELGKYEQGSGYIPEAPRDGQAYVRKDGEWVLLSTFL

SEQ ID NO: 39 - protein, 1242 aa, Artificial Sequence
  Description of Artificial Sequence: Synthetic polypeptide
  pKL061
MNEGSIMWLASLAVVIACAGANLTTRTQLPPAYTNSFTRGVYYPDKVFRSSVLHSTQDLFLPFFSNVTWFHAIHVSGTNGTKRFDNPVLPFNDGVYFASTEKSNIIRGWIFGTTLDSKTQSLLIVNNATNVVIKVCEFQFCNDPFLGVYYHKNNKSWMESEFRVYSSANNCTFEYVSQPFLMDLEGKQGNFKNLREFVFKNIDGYFKIYSKHTPINLVRDLPQGFSALEPLVDLPIGINITRFQTLLALHRSYLTPGDSSSGWTAGAAAYYVGYLQPRTFLLKYNENGTITDAVDCALDPLSETKCTLKSFTVEKGIYQTSNFRVQPTESIVRFPNITNLCPFGEVFNATRFASVYAWNRKRISNCVADYSVLYNSASFSTFKCYGVSPTKLNDLCFTNVYADSFVIRGDEVRQIAPGQTGKIADYNYKLPDDFTGCVIAWNSNNLDSKVGGNYNYLYRLFRKSNLKPFERDISTEIYQAGSTPCNGVEGFNCYFPLQSYGFQPTNGVGYQPYRVVVLSFELLHAPATVCGPKKSTNLVKNKCVNFNFNGLTGTGVLTESNKKFLPFQQFGRDIADTTDAVRDPQTLEILDITPCSFGGVSVITPGTNTSNQVAVLYQDVNCTEVPVAIHADQLTPTWRVYSTGSNVFQTRAGCLIGAEHVNNSYECDIPIGAGICASYQTQTNSPGSASSVASQSIIAYTMSLGAENSVAYSNNSIAIPTNFTISVTTEILPVSMTKTSVDCTMYICGDSTECSNLLLQYGSFCTQLNRALTGIAVEQDKNTQEVFAQVKQIYKTPPIKDFGGFNFSQILPDPSKPSKRSFIEDLLFNKVTLADAGFIKQYGDCLGDIAARDLICAQKFNGLTVLPPLLTDEMIAQYTSALLAGTITSGWTFGAGAALQIPFAMQMAYRFNGIGVTQNVLYENQKLIANQFNSAIGKIQDSLSSTASALGKLQDVVNQNAQALNTLVKQLSSNFGAISSVLNDILSRLDPPEAEVQIDRLITGRLQSLQTYVTQQLIRAAEIRASANLAATKMSECVLGQSKRVDFCGKGYHLMSFPQSAPHGVVFLHVTYVPAQEKNFTTAPAICHDGKAHFPREGVFVSNGTHWFVTQRNFYEPQIITTDNTFVSGNCDVVIGIVNNTVYDPLQPELDSFKEELDKYFKNHTSPDVDLGDISGINASVVNIQKEIDRLNEVAKNLNESLIDLQELGKYEQGSGYIPEAPRDGQAYVRKDGEWVLLSTFL

SEQ ID NO: 40 - protein, 1240 aa, Artificial Sequence
  Description of Artificial Sequence: Synthetic polypeptide
  pKL062
MNEGSIMWLASLAVVIACAGATTRTQLPPAYTNSFTRGVYYPDKVFRSSVLHSTQDLFLPFFSNVTWFHAIHVSGTNGTKRFDNPVLPFNDGVYFASTEKSNIIRGWIFGTTLDSKTQSLLIVNNATNVVIKVCEFQFCNDPFLGVYYHKNNKSWMESEFRVYSSANNCTFEYVSQPFLMDLEGKQGNFKNLREFVFKNIDGYFKIYSKHTPINLVRDLPQGFSALEPLVDLPIGINITRFQTLLALHRSYLTPGDSSSGWTAGAAAYYVGYLQPRTFLLKYNENGTITDAVDCALDPLSETKCTLKSFTVEKGIYQTSNFRVQPTESIVRFPNITNLCPFGEVFNATRFASVYAWNRKRISNCVADYSVLYNSASFSTFKCYGVSPTKLNDLCFTNVYADSFVIRGDEVRQIAPGQTGKIADYNYKLPDDFTGCVIAWNSNNLDSKVGGNYNYLYRLFRKSNLKPFERDISTEIYQAGSTPCNGVEGFNCYFPLQSYGFQPTNGVGYQPYRVVVLSFELLHAPATVCGPKKSTNLVKNKCVNFNFNGLTGTGVLTESNKKFLPFQQFGRDIADTTDAVRDPQTLEILDITPCSFGGVSVITPGTNTSNQVAVLYQDVNCTEVPVAIHADQLTPTWRVYSTGSNVFQTRAGCLIGAEHVNNSYECDIPIGAGICASYQTQTNSPGSASSVASQSIIAYTMSLGAENSVAYSNNSIAIPTNFTISVTTEILPVSMTKTSVDCTMYICGDSTECSNLLLQYGSFCTQLNRALTGIAVEQDKNTQEVFAQVKQIYKTPPIKDFGGFNFSQILPDPSKPSKRSFIEDLLFNKVTLADAGFIKQYGDCLGDIAARDLICAQKFNGLTVLPPLLTDEMIAQYTSALLAGTITSGWTFGAGAALQIPFAMQMAYRFNGIGVTQNVLYENQKLIANQFNSAIGKIQDSLSSTASALGKLQDVVNQNAQALNTLVKQLSSNFGAISSVLNDILSRLDPPEAEVQIDRLITGRLQSLQTYVTQQLIRAAEIRASANLAATKMSECVLGQSKRVDFCGKGYHLMSFPQSAPHGVVFLHVTYVPAQEKNFTTAPAICHDGKAHFPREGVFVSNGTHWFVTQRNFYEPQIITTDNTFVSGNCDVVIGIVNNTVYDPLQPELDSFKEELDKYFKNHTSPDVDLGDISGINASVVNIQKEIDRLNEVAKNLNESLIDLQELGKYEQGSGYIPEAPRDGQAYVRKDGEWVLLSTFL

SEQ ID NO: 41 - protein, 1251 aa, Artificial Sequence
  Description of Artificial Sequence: Synthetic polypeptide
  pKL063
MGRKQNKRGGNEGSIMWLASLAVVIACAGANLTTRTQLPPAYTNSFTRGVYYPDKVFRSSVLHSTQDLFLPFFSNVTWFHAIHVSGTNGTKRFDNPVLPFNDGVYFASTEKSNIIRGWIFGTTLDSKTQSLLIVNNATNVVIKVCEFQFCNDPFLGVYYHKNNKSWMESEFRVYSSANNCTFEYVSQPFLMDLEGKQGNFKNLREFVFKNIDGYFKIYSKHTPINLVRDLPQGFSALEPLVDLPIGINITRFQTLLALHRSYLTPGDSSSGWTAGAAAYYVGYLQPRTFLLKYNENGTITDAVDCALDPLSETKCTLKSFTVEKGIYQTSNFRVQPTESIVRFPNITNLCPFGEVFNATRFASVYAWNRKRISNCVADYSVLYNSASFSTFKCYGVSPTKLNDLCFTNVYADSFVIRGDEVRQIAPGQTGKIADYNYKLPDDFTGCVIAWNSNNLDSKVGGNYNYLYRLFRKSNLKPFERDISTEIYQAGSTPCNGVEGFNCYFPLQSYGFQPTNGVGYQPYRVVVLSFELLHAPATVCGPKKSTNLVKNKCVNFNFNGLTGTGVLTESNKKFLPFQQFGRDIADTTDAVRDPQTLEILDITPCSFGGVSVITPGTNTSNQVAVLYQDVNCTEVPVAIHADQLTPTWRVYSTGSNVFQTRAGCLIGAEHVNNSYECDIPIGAGICASYQTQTNSPGSASSVASQSIIAYTMSLGAENSVAYSNNSIAIPTNFTISVTTEILPVSMTKTSVDCTMYICGDSTECSNLLLQYGSFCTQLNRALTGIAVEQDKNTQEVFAQVKQIYKTPPIKDFGGFNFSQILPDPSKPSKRSFIEDLLFNKVTLADAGFIKQYGDCLGDIAARDLICAQKFNGLTVLPPLLTDEMIAQYTSALLAGTITSGWTFGAGAALQIPFAMQMAYRFNGIGVTQNVLYENQKLIANQFNSAIGKIQDSLSSTASALGKLQDVVNQNAQALNTLVKQLSSNFGAISSVLNDILSRLDPPEAEVQIDRLITGRLQSLQTYVTQQLIRAAEIRASANLAATKMSECVLGQSKRVDFCGKGYHLMSFPQSAPHGVVFLHVTYVPAQEKNFTTAPAICHDGKAHFPREGVFVSNGTHWFVTQRNFYEPQIITTDNTFVSGNCDVVIGIVNNTVYDPLQPELDSFKEELDKYFKNHTSPDVDLGDISGINASVVNIQKEIDRLNEVAKNLNESLIDLQELGKYEQGSGYIPEAPRDGQAYVRKDGEWVLLSTFL

SEQ ID NO: 42 - protein, 1249 aa, Artificial Sequence
  Description of Artificial Sequence: Synthetic polypeptide
  pKL064
MGRKQNKRGGNEGSIMWLASLAVVIACAGATTRTQLPPAYTNSFTRGVYYPDKVFRSSVLHSTQDLFLPFFSNVTWFHAIHVSGTNGTKRFDNPVLPFNDGVYFASTEKSNIIRGWIFGTTLDSKTQSLLIVNNATNVVIKVCEFQFCNDPFLGVYYHKNNKSWMESEFRVYSSANNCTFEYVSQPFLMDLEGKQGNFKNLREFVFKNIDGYFKIYSKHTPINLVRDLPQGFSALEPLVDLPIGINITRFQTLLALHRSYLTPGDSSSGWTAGAAAYYVGYLQPRTFLLKYNENGTITDAVDCALDPLSETKCTLKSFTVEKGIYQTSNFRVQPTESIVRFPNITNLCPFGEVFNATRFASVYAWNRKRISNCVADYSVLYNSASFSTFKCYGVSPTKLNDLCFTNVYADSFVIRGDEVRQIAPGQTGKIADYNYKLPDDFTGCVIAWNSNNLDSKVGGNYNYLYRLFRKSNLKPFERDISTEIYQAGSTPCNGVEGFNCYFPLQSYGFQPTNGVGYQPYRVVVLSFELLHAPATVCGPKKSTNLVKNKCVNFNFNGLTGTGVLTESNKKFLPFQQFGRDIADTTDAVRDPQTLEILDITPCSFGGVSVITPGTNTSNQVAVLYQDVNCTEVPVAIHADQLTPTWRVYSTGSNVFQTRAGCLIGAEHVNNSYECDIPIGAGICASYQTQTNSPGSASSVASQSIIAYTMSLGAENSVAYSNNSIAIPTNFTISVTTEILPVSMTKTSVDCTMYICGDSTECSNLLLQYGSFCTQLNRALTGIAVEQDKNTQEVFAQVKQIYKTPPIKDFGGFNFSQILPDPSKPSKRSFIEDLLFNKVTLADAGFIKQYGDCLGDIAARDLICAQKFNGLTVLPPLLTDEMIAQYTSALLAGTITSGWTFGAGAALQIPFAMQMAYRFNGIGVTQNVLYENQKLIANQFNSAIGKIQDSLSSTASALGKLQDVVNQNAQALNTLVKQLSSNFGAISSVLNDILSRLDPPEAEVQIDRLITGRLQSLQTYVTQQLIRAAEIRASANLAATKMSECVLGQSKRVDFCGKGYHLMSFPQSAPHGVVFLHVTYVPAQEKNFTTAPAICHDGKAHFPREGVFVSNGTHWFVTQRNFYEPQIITTDNTFVSGNCDVVIGIVNNTVYDPLQPELDSFKEELDKYFKNHTSPDVDLGDISGINASVVNIQKEIDRLNEVAKNLNESLIDLQELGKYEQGSGYIPEAPRDGQAYVRKDGEWVLLSTFL

SEQ ID NO: 43 - protein, 1242 aa, Artificial Sequence
  Description of Artificial Sequence: Synthetic polypeptide
  pKL065
METDTLLLWVLLLWVPGSTGDNLTTRTQLPPAYTNSFTRGVYYPDKVFRSSVLHSTQDLFLPFFSNVTWFHAIHVSGTNGTKRFDNPVLPFNDGVYFASTEKSNIIRGWIFGTTLDSKTQSLLIVNNATNVVIKVCEFQFCNDPFLGVYYHKNNKSWMESEFRVYSSANNCTFEYVSQPFLMDLEGKQGNFKNLREFVFKNIDGYFKIYSKHTPINLVRDLPQGFSALEPLVDLPIGINITRFQTLLALHRSYLTPGDSSSGWTAGAAAYYVGYLQPRTFLLKYNENGTITDAVDCALDPLSETKCTLKSFTVEKGIYQTSNFRVQPTESIVRFPNITNLCPFGEVFNATRFASVYAWNRKRISNCVADYSVLYNSASFSTFKCYGVSPTKLNDLCFTNVYADSFVIRGDEVRQIAPGQTGKIADYNYKLPDDFTGCVIAWNSNNLDSKVGGNYNYLYRLFRKSNLKPFERDISTEIYQAGSTPCNGVEGFNCYFPLQSYGFQPTNGVGYQPYRVVVLSFELLHAPATVCGPKKSTNLVKNKCVNFNFNGLTGTGVLTESNKKFLPFQQFGRDIADTTDAVRDPQTLEILDITPCSFGGVSVITPGTNTSNQVAVLYQDVNCTEVPVAIHADQLTPTWRVYSTGSNVFQTRAGCLIGAEHVNNSYECDIPIGAGICASYQTQTNSPGSASSVASQSIIAYTMSLGAENSVAYSNNSIAIPTNFTISVTTEILPVSMTKTSVDCTMYICGDSTECSNLLLQYGSFCTQLNRALTGIAVEQDKNTQEVFAQVKQIYKTPPIKDFGGFNFSQILPDPSKPSKRSFIEDLLFNKVTLADAGFIKQYGDCLGDIAARDLICAQKFNGLTVLPPLLTDEMIAQYTSALLAGTITSGWTFGAGAALQIPFAMQMAYRFNGIGVTQNVLYENQKLIANQFNSAIGKIQDSLSSTASALGKLQDVVNQNAQALNTLVKQLSSNFGAISSVLNDILSRLDPPEAEVQIDRLITGRLQSLQTYVTQQLIRAAEIRASANLAATKMSECVLGQSKRVDFCGKGYHLMSFPQSAPHGVVFLHVTYVPAQEKNFTTAPAICHDGKAHFPREGVFVSNGTHWFVTQRNFYEPQIITTDNTFVSGNCDVVIGIVNNTVYDPLQPELDSFKEELDKYFKNHTSPDVDLGDISGINASVVNIQKEIDRLNEVAKNLNESLIDLQELGKYEQGSGYIPEAPRDGQAYVRKDGEWVLLSTFL

SEQ ID NO: 44 - protein, 1240 aa, Artificial Sequence
  Description of Artificial Sequence: Synthetic polypeptide
  pKL066
METDTLLLWVLLLWVPGSTGDTTRTQLPPAYTNSFTRGVYYPDKVFRSSVLHSTQDLFLPFFSNVTWFHAIHVSGTNGTKRFDNPVLPFNDGVYFASTEKSNIIRGWIFGTTLDSKTQSLLIVNNATNVVIKVCEFQFCNDPFLGVYYHKNNKSWMESEFRVYSSANNCTFEYVSQPFLMDLEGKQGNFKNLREFVFKNIDGYFKIYSKHTPINLVRDLPQGFSALEPLVDLPIGINITRFQTLLALHRSYLTPGDSSSGWTAGAAAYYVGYLQPRTFLLKYNENGTITDAVDCALDPLSETKCTLKSFTVEKGIYQTSNFRVQPTESIVRFPNITNLCPFGEVFNATRFASVYAWNRKRISNCVADYSVLYNSASFSTFKCYGVSPTKLNDLCFTNVYADSFVIRGDEVRQIAPGQTGKIADYNYKLPDDFTGCVIAWNSNNLDSKVGGNYNYLYRLFRKSNLKPFERDISTEIYQAGSTPCNGVEGFNCYFPLQSYGFQPTNGVGYQPYRVVVLSFELLHAPATVCGPKKSTNLVKNKCVNFNFNGLTGTGVLTESNKKFLPFQQFGRDIADTTDAVRDPQTLEILDITPCSFGGVSVITPGTNTSNQVAVLYQDVNCTEVPVAIHADQLTPTWRVYSTGSNVFQTRAGCLIGAEHVNNSYECDIPIGAGICASYQTQTNSPGSASSVASQSIIAYTMSLGAENSVAYSNNSIAIPTNFTISVTTEILPVSMTKTSVDCTMYICGDSTECSNLLLQYGSFCTQLNRALTGIAVEQDKNTQEVFAQVKQIYKTPPIKDFGGFNFSQILPDPSKPSKRSFIEDLLFNKVTLADAGFIKQYGDCLGDIAARDLICAQKFNGLTVLPPLLTDEMIAQYTSALLAGTITSGWTFGAGAALQIPFAMQMAYRFNGIGVTQNVLYENQKLIANQFNSAIGKIQDSLSSTASALGKLQDVVNQNAQALNTLVKQLSSNFGAISSVLNDILSRLDPPEAEVQIDRLITGRLQSLQTYVTQQLIRAAEIRASANLAATKMSECVLGQSKRVDFCGKGYHLMSFPQSAPHGVVFLHVTYVPAQEKNFTTAPAICHDGKAHFPREGVFVSNGTHWFVTQRNFYEPQIITTDNTFVSGNCDVVIGIVNNTVYDPLQPELDSFKEELDKYFKNHTSPDVDLGDISGINASVVNIQKEIDRLNEVAKNLNESLIDLQELGKYEQGSGYIPEAPRDGQAYVRKDGEWVLLSTFL

SEQ ID NO: 45 - protein, 1242 aa, Artificial Sequence
  Description of Artificial Sequence: Synthetic polypeptide
  pKL067
MRPTLLWSLLLLLGVFAAAAANLTTRTQLPPAYTNSFTRGVYYPDKVFRSSVLHSTQDLFLPFFSNVTWFHAIHVSGTNGTKRFDNPVLPFNDGVYFASTEKSNIIRGWIFGTTLDSKTQSLLIVNNATNVVIKVCEFQFCNDPFLGVYYHKNNKSWMESEFRVYSSANNCTFEYVSQPFLMDLEGKQGNFKNLREFVFKNIDGYFKIYSKHTPINLVRDLPQGFSALEPLVDLPIGINITRFQTLLALHRSYLTPGDSSSGWTAGAAAYYVGYLQPRTFLLKYNENGTITDAVDCALDPLSETKCTLKSFTVEKGIYQTSNFRVQPTESIVRFPNITNLCPFGEVFNATRFASVYAWNRKRISNCVADYSVLYNSASFSTFKCYGVSPTKLNDLCFTNVYADSFVIRGDEVRQIAPGQTGKIADYNYKLPDDFTGCVIAWNSNNLDSKVGGNYNYLYRLFRKSNLKPFERDISTEIYQAGSTPCNGVEGFNCYFPLQSYGFQPTNGVGYQPYRVVVLSFELLHAPATVCGPKKSTNLVKNKCVNFNFNGLTGTGVLTESNKKFLPFQQFGRDIADTTDAVRDPQTLEILDITPCSFGGVSVITPGTNTSNQVAVLYQDVNCTEVPVAIHADQLTPTWRVYSTGSNVFQTRAGCLIGAEHVNNSYECDIPIGAGICASYQTQTNSPGSASSVASQSIIAYTMSLGAENSVAYSNNSIAIPTNFTISVTTEILPVSMTKTSVDCTMYICGDSTECSNLLLQYGSFCTQLNRALTGIAVEQDKNTQEVFAQVKQIYKTPPIKDFGGFNFSQILPDPSKPSKRSFIEDLLFNKVTLADAGFIKQYGDCLGDIAARDLICAQKFNGLTVLPPLLTDEMIAQYTSALLAGTITSGWTFGAGAALQIPFAMQMAYRFNGIGVTQNVLYENQKLIANQFNSAIGKIQDSLSSTASALGKLQDVVNQNAQALNTLVKQLSSNFGAISSVLNDILSRLDPPEAEVQIDRLITGRLQSLQTYVTQQLIRAAEIRASANLAATKMSECVLGQSKRVDFCGKGYHLMSFPQSAPHGVVFLHVTYVPAQEKNFTTAPAICHDGKAHFPREGVFVSNGTHWFVTQRNFYEPQIITTDNTFVSGNCDVVIGIVNNTVYDPLQPELDSFKEELDKYFKNHTSPDVDLGDISGINASVVNIQKEIDRLNEVAKNLNESLIDLQELGKYEQGSGYIPEAPRDGQAYVRKDGEWVLLSTFL

SEQ ID NO: 46 - protein, 1240 aa, Artificial Sequence
  Description of Artificial Sequence: Synthetic polypeptide
  pKL068
MRPTLLWSLLLLLGVFAAAAATTRTQLPPAYTNSFTRGVYYPDKVFRSSVLHSTQDLFLPFFSNVTWFHAIHVSGTNGTKRFDNPVLPFNDGVYFASTEKSNIIRGWIFGTTLDSKTQSLLIVNNATNVVIKVCEFQFCNDPFLGVYYHKNNKSWMESEFRVYSSANNCTFEYVSQPFLMDLEGKQGNFKNLREFVFKNIDGYFKIYSKHTPINLVRDLPQGFSALEPLVDLPIGINITRFQTLLALHRSYLTPGDSSSGWTAGAAAYYVGYLQPRTFLLKYNENGTITDAVDCALDPLSETKCTLKSFTVEKGIYQTSNFRVQPTESIVRFPNITNLCPFGEVFNATRFASVYAWNRKRISNCVADYSVLYNSASFSTFKCYGVSPTKLNDLCFTNVYADSFVIRGDEVRQIAPGQTGKIADYNYKLPDDFTGCVIAWNSNNLDSKVGGNYNYLYRLFRKSNLKPFERDISTEIYQAGSTPCNGVEGFNCYFPLQSYGFQPTNGVGYQPYRVVVLSFELLHAPATVCGPKKSTNLVKNKCVNFNFNGLTGTGVLTESNKKFLPFQQFGRDIADTTDAVRDPQTLEILDITPCSFGGVSVITPGTNTSNQVAVLYQDVNCTEVPVAIHADQLTPTWRVYSTGSNVFQTRAGCLIGAEHVNNSYECDIPIGAGICASYQTQTNSPGSASSVASQSIIAYTMSLGAENSVAYSNNSIAIPTNFTISVTTEILPVSMTKTSVDCTMYICGDSTECSNLLLQYGSFCTQLNRALTGIAVEQDKNTQEVFAQVKQIYKTPPIKDFGGFNFSQILPDPSKPSKRSFIEDLLFNKVTLADAGFIKQYGDCLGDIAARDLICAQKFNGLTVLPPLLTDEMIAQYTSALLAGTITSGWTFGAGAALQIPFAMQMAYRFNGIGVTQNVLYENQKLIANQFNSAIGKIQDSLSSTASALGKLQDVVNQNAQALNTLVKQLSSNFGAISSVLNDILSRLDPPEAEVQIDRLITGRLQSLQTYVTQQLIRAAEIRASANLAATKMSECVLGQSKRVDFCGKGYHLMSFPQSAPHGVVFLHVTYVPAQEKNFTTAPAICHDGKAHFPREGVFVSNGTHWFVTQRNFYEPQIITTDNTFVSGNCDVVIGIVNNTVYDPLQPELDSFKEELDKYFKNHTSPDVDLGDISGINASVVNIQKEIDRLNEVAKNLNESLIDLQELGKYEQGSGYIPEAPRDGQAYVRKDGEWVLLSTFL

SEQ ID NO: 47 - protein, 1240 aa, Artificial Sequence
  Description of Artificial Sequence: Synthetic polypeptide
  pKL069
MGVKVLFALICIAVAEAKPNLTTRTQLPPAYTNSFTRGVYYPDKVFRSSVLHSTQDLFLPFFSNVTWFHAIHVSGTNGTKRFDNPVLPFNDGVYFASTEKSNIIRGWIFGTTLDSKTQSLLIVNNATNVVIKVCEFQFCNDPFLGVYYHKNNKSWMESEFRVYSSANNCTFEYVSQPFLMDLEGKQGNFKNLREFVFKNIDGYFKIYSKHTPINLVRDLPQGFSALEPLVDLPIGINITRFQTLLALHRSYLTPGDSSSGWTAGAAAYYVGYLQPRTFLLKYNENGTITDAVDCALDPLSETKCTLKSFTVEKGIYQTSNFRVQPTESIVRFPNITNLCPFGEVFNATRFASVYAWNRKRISNCVADYSVLYNSASFSTFKCYGVSPTKLNDLCFTNVYADSFVIRGDEVRQIAPGQTGKIADYNYKLPDDFTGCVIAWNSNNLDSKVGGNYNYLYRLFRKSNLKPFERDISTEIYQAGSTPCNGVEGFNCYFPLQSYGFQPTNGVGYQPYRVVVLSFELLHAPATVCGPKKSTNLVKNKCVNFNFNGLTGTGVLTESNKKFLPFQQFGRDIADTTDAVRDPQTLEILDITPCSFGGVSVITPGTNTSNQVAVLYQDVNCTEVPVAIHADQLTPTWRVYSTGSNVFQTRAGCLIGAEHVNNSYECDIPIGAGICASYQTQTNSPGSASSVASQSIIAYTMSLGAENSVAYSNNSIAIPTNFTISVTTEILPVSMTKTSVDCTMYICGDSTECSNLLLQYGSFCTQLNRALTGIAVEQDKNTQEVFAQVKQIYKTPPIKDFGGFNFSQILPDPSKPSKRSFIEDLLFNKVTLADAGFIKQYGDCLGDIAARDLICAQKFNGLTVLPPLLTDEMIAQYTSALLAGTITSGWTFGAGAALQIPFAMQMAYRFNGIGVTQNVLYENQKLIANQFNSAIGKIQDSLSSTASALGKLQDVVNQNAQALNTLVKQLSSNFGAISSVLNDILSRLDPPEAEVQIDRLITGRLQSLQTYVTQQLIRAAEIRASANLAATKMSECVLGQSKRVDFCGKGYHLMSFPQSAPHGVVFLHVTYVPAQEKNFTTAPAICHDGKAHFPREGVFVSNGTHWFVTQRNFYEPQIITTDNTFVSGNCDVVIGIVNNTVYDPLQPELDSFKEELDKYFKNHTSPDVDLGDISGINASVVNIQKEIDRLNEVAKNLNESLIDLQELGKYEQGSGYIPEAPRDGQAYVRKDGEWVLLSTFL

SEQ ID NO: 48 - protein, 1238 aa, Artificial Sequence
  Description of Artificial Sequence: Synthetic polypeptide
  pKL070
MGVKVLFALICIAVAEAKPTTRTQLPPAYTNSFTRGVYYPDKVFRSSVLHSTQDLFLPFFSNVTWFHAIHVSGTNGTKRFDNPVLPFNDGVYFASTEKSNIIRGWIFGTTLDSKTQSLLIVNNATNVVIKVCEFQFCNDPFLGVYYHKNNKSWMESEFRVYSSANNCTFEYVSQPFLMDLEGKQGNFKNLREFVFKNIDGYFKIYSKHTPINLVRDLPQGFSALEPLVDLPIGINITRFQTLLALHRSYLTPGDSSSGWTAGAAAYYVGYLQPRTFLLKYNENGTITDAVDCALDPLSETKCTLKSFTVEKGIYQTSNFRVQPTESIVRFPNITNLCPFGEVFNATRFASVYAWNRKRISNCVADYSVLYNSASFSTFKCYGVSPTKLNDLCFTNVYADSFVIRGDEVRQIAPGQTGKIADYNYKLPDDFTGCVIAWNSNNLDSKVGGNYNYLYRLFRKSNLKPFERDISTEIYQAGSTPCNGVEGFNCYFPLQSYGFQPTNGVGYQPYRVVVLSFELLHAPATVCGPKKSTNLVKNKCVNFNFNGLTGTGVLTESNKKFLPFQQFGRDIADTTDAVRDPQTLEILDITPCSFGGVSVITPGTNTSNQVAVLYQDVNCTEVPVAIHADQLTPTWRVYSTGSNVFQTRAGCLIGAEHVNNSYECDIPIGAGICASYQTQTNSPGSASSVASQSIIAYTMSLGAENSVAYSNNSIAIPTNFTISVTTEILPVSMTKTSVDCTMYICGDSTECSNLLLQYGSFCTQLNRALTGIAVEQDKNTQEVFAQVKQIYKTPPIKDFGGFNFSQILPDPSKPSKRSFIEDLLFNKVTLADAGFIKQYGDCLGDIAARDLICAQKFNGLTVLPPLLTDEMIAQYTSALLAGTITSGWTFGAGAALQIPFAMQMAYRFNGIGVTQNVLYENQKLIANQFNSAIGKIQDSLSSTASALGKLQDVVNQNAQALNTLVKQLSSNFGAISSVLNDILSRLDPPEAEVQIDRLITGRLQSLQTYVTQQLIRAAEIRASANLAATKMSECVLGQSKRVDFCGKGYHLMSFPQSAPHGVVFLHVTYVPAQEKNFTTAPAICHDGKAHFPREGVFVSNGTHWFVTQRNFYEPQIITTDNTFVSGNCDVVIGIVNNTVYDPLQPELDSFKEELDKYFKNHTSPDVDLGDISGINASVVNIQKEIDRLNEVAKNLNESLIDLQELGKYEQGSGYIPEAPRDGQAYVRKDGEWVLLSTFL

SEQ ID NO: 49 - protein, 1273 aa, Artificial Sequence
  Description of Artificial Sequence: Synthetic polypeptide
  pJW019
MFVFLVLLPLVSSQCVNLTTRTQLPPAYTNSFTRGVYYPDKVFRSSVLHSTQDLFLPFFSNVTWFHAIHVSGTNGTKRFDNPVLPFNDGVYFASTEKSNIIRGWIFGTTLDSKTQSLLIVNNATNVVIKVCEFQFCNDPFLGVYYHKNNKSWMESEFRVYSSANNCTFEYVSQPFLMDLEGKQGNFKNLREFVFKNIDGYFKIYSKHTPINLVRDLPQGFSALEPLVDLPIGINITRFQTLLALHRSYLTPGDSSSGWTAGAAAYYVGYLQPRTFLLKYNENGTITDAVDCALDPLSETKCTLKSFTVEKGIYQTSNFRVQPTESIVRFPNITNLCPFGEVFNATRFASVYAWNRKRISNCVADYSVLYNSASFSTFKCYGVSPTKLNDLCFTNVYADSFVIRGDEVRQIAPGQTGKIADYNYKLPDDFTGCVIAWNSNNLDSKVGGNYNYLYRLFRKSNLKPFERDISTEIYQAGSTPCNGVEGFNCYFPLQSYGFQPTNGVGYQPYRVVVLSFELLHAPATVCGPKKSTNLVKNKCVNFNFNGLTGTGVLTESNKKFLPFQQFGRDIADTTDAVRDPQTLEILDITPCSFGGVSVITPGTNTSNQVAVLYQDVNCTEVPVAIHADQLTPTWRVYSTGSNVFQTRAGCLIGAEHVNNSYECDIPIGAGICASYQTQTNSPGSASSVASQSIIAYTMSLGAENSVAYSNNSIAIPTNFTISVTTEILPVSMTKTSVDCTMYICGDSTECSNLLLQYGSFCTQLNRALTGIAVEQDKNTQEVFAQVKQIYKTPPIKDFGGFNFSQILPDPSKPSKRSFIEDLLFNKVTLADAGFIKQYGDCLGDIAARDLICAQKFNGLTVLPPLLTDEMIAQYTSALLAGTITSGWTFGAGAALQIPFAMQMAYRFNGIGVTQNVLYENQKLIANQFNSAIGKIQDSLSSTASALGKLQDVVNQNAQALNTLVKQLSSNFGAISSVLNDILSRLDPPEAEVQIDRLITGRLQSLQTYVTQQLIRAAEIRASANLAATKMSECVLGQSKRVDFCGKGYHLMSFPQSAPHGVVFLHVTYVPAQEKNFTTAPAICHDGKAHFPREGVFVSNGTHWFVTQRNFYEPQIITTDNTFVSGNCDVVIGIVNNTVYDPLQPELDSFKEELDKYFKNHTSPDVDLGDISGINASVVNIQKEIDRLNEVAKNLNESLIDLQELGKYEQYIKWPWYIWLGFIAGLIAIVMVTIMLCCMTSCCSCLKGCCSCGSCCKFDEDDSEPVLKGVKLHYT

SEQ ID NO: 50 - protein, 1273 aa, Artificial Sequence
  Description of Artificial Sequence: Synthetic polypeptide
  pKL025
MFVFLVLLPLVSSQCVNLTTRTQLPPAYTNSFTRGVYYPDKVFRSSVLHSTQDLFLPFFSNVTWFHAIHVSGTNGTKRFDNPVLPFNDGVYFASTEKSNIIRGWIFGTTLDSKTQSLLIVNNATNVVIKVCEFQFCNDPFLGVYYHKNNKSWMESEFRVYSSANNCTFEYVSQPFLMDLEGKQGNFKNLREFVFKNIDGYFKIYSKHTPINLVRDLPQGFSALEPLVDLPIGINITRFQTLLALHRSYLTPGDSSSGWTAGAAAYYVGYLQPRTFLLKYNENGTITDAVDCALDPLSETKCTLKSFTVEKGIYQTSNFRVQPTESIVRFPNITNLCPFGEVFNATRFASVYAWNRKRISNCVADYSVLYNSASFSTFKCYGVSPTKLNDLCFTNVYADSFVIRGDEVRQIAPGQTGKIADYNYKLPDDFTGCVIAWNSNNLDSKVGGNYNYLYRLFRKSNLKPFERDISTEIYQAGSTPCNGVEGFNCYFPLQSYGFQPTNGVGYQPYRVVVLSFELLHAPATVCGPKKSTNLVKNKCVNFNFNGLTGTGVLTESNKKFLPFQQFGRDIADTTDAVRDPQTLEILDITPCSFGGVSVITPGTNTSNQVAVLYQDVNCTEVPVAIHADQLTPTWRVYSTGSNVFQTRAGCLIGAEHVNNSYECDIPIGAGICASYQTQTNSPGSASSVASQSIIAYTMSLGAENSVAYSNNSIAIPTNFTISVTTEILPVSMTKTSVDCTMYICGDSTECSNLLLQYGSFCTQLNRALTGIAVEQDKNTQEVFAQVKQIYKTPPIKDFGGFNFSQILPDPSKPSKRSFIEDLLFNKVTLADAGFIKQYGDCLGDIAARDLICAQKFNGLTVLPPLLTDEMIAQYTSALLAGTITSGWTFGAGAALQIPFAMQMAYRFNGIGVTQNVLYENQKLIANQFNSAIGKIQDSLSSTASALGKLQDVVNQNAQALNTLVKQLSSNFGAISSVLNDILSRLDPPEAEVQIDRLITGRLQSLQTYVTQQLIRAAEIRASANLAATKMSECVLGQSKRVDFCGKGYHLMSFPQSAPHGVVFLHVTYVPAQEKNFTTAPAICHDGKAHFPREGVFVSNGTHWFVTQRNFYEPQIITTDNTFVSGNCDVVIGIVNNTVYDPLQPELDSFKEELDKYFKNHTSPDVDLGDISGINASVVNIQKEIDRLNEVAKNLNESLIDLQELGKYEQYIKWPWYIWLGFIAGLIAIVMVTIMLCCMTSCCSCLKGCCSCGSCCKFDEDDSEPVLKGVALAYT

SEQ ID NO: 51 - protein, 1260 aa, Artificial Sequence
  Description of Artificial Sequence: Synthetic polypeptide
  pKL026
MFVFLVLLPLVSSQCVNLTTRTQLPPAYTNSFTRGVYYPDKVFRSSVLHSTQDLFLPFFSNVTWFHAIHVSGTNGTKRFDNPVLPFNDGVYFASTEKSNIIRGWIFGTTLDSKTQSLLIVNNATNVVIKVCEFQFCNDPFLGVYYHKNNKSWMESEFRVYSSANNCTFEYVSQPFLMDLEGKQGNFKNLREFVFKNIDGYFKIYSKHTPINLVRDLPQGFSALEPLVDLPIGINITRFQTLLALHRSYLTPGDSSSGWTAGAAAYYVGYLQPRTFLLKYNENGTITDAVDCALDPLSETKCTLKSFTVEKGIYQTSNFRVQPTESIVRFPNITNLCPFGEVFNATRFASVYAWNRKRISNCVADYSVLYNSASFSTFKCYGVSPTKLNDLCFTNVYADSFVIRGDEVRQIAPGQTGKIADYNYKLPDDFTGCVIAWNSNNLDSKVGGNYNYLYRLFRKSNLKPFERDISTEIYQAGSTPCNGVEGFNCYFPLQSYGFQPTNGVGYQPYRVVVLSFELLHAPATVCGPKKSTNLVKNKCVNFNFNGLTGTGVLTESNKKFLPFQQFGRDIADTTDAVRDPQTLEILDITPCSFGGVSVITPGTNTSNQVAVLYQDVNCTEVPVAIHADQLTPTWRVYSTGSNVFQTRAGCLIGAEHVNNSYECDIPIGAGICASYQTQTNSPGSASSVASQSIIAYTMSLGAENSVAYSNNSIAIPTNFTISVTTEILPVSMTKTSVDCTMYICGDSTECSNLLLQYGSFCTQLNRALTGIAVEQDKNTQEVFAQVKQIYKTPPIKDFGGFNFSQILPDPSKPSKRSFIEDLLFNKVTLADAGFIKQYGDCLGDIAARDLICAQKFNGLTVLPPLLTDEMIAQYTSALLAGTITSGWTFGAGAALQIPFAMQMAYRFNGIGVTQNVLYENQKLIANQFNSAIGKIQDSLSSTASALGKLQDVVNQNAQALNTLVKQLSSNFGAISSVLNDILSRLDPPEAEVQIDRLITGRLQSLQTYVTQQLIRAAEIRASANLAATKMSECVLGQSKRVDFCGKGYHLMSFPQSAPHGVVFLHVTYVPAQEKNFTTAPAICHDGKAHFPREGVFVSNGTHWFVTQRNFYEPQIITTDNTFVSGNCDVVIGIVNNTVYDPLQPELDSFKEELDKYFKNHTSPDVDLGDISGINASVVNIQKEIDRLNEVAKNLNESLIDLQELGKYEQYIKWPWYIWLGFIAGLIAIVMVTIMLCCMTSCCSCLKGCCSCGSCCKFDEDD

SEQ ID NO: 52 - protein, 1275 aa, Artificial Sequence
  Description of Artificial Sequence: Synthetic polypeptide
  pKL027
MGVKVLFALICIAVAEAKNLTTRTQLPPAYTNSFTRGVYYPDKVFRSSVLHSTQDLFLPFFSNVTWFHAIHVSGTNGTKRFDNPVLPFNDGVYFASTEKSNIIRGWIFGTTLDSKTQSLLIVNNATNVVIKVCEFQFCNDPFLGVYYHKNNKSWMESEFRVYSSANNCTFEYVSQPFLMDLEGKQGNFKNLREFVFKNIDGYFKIYSKHTPINLVRDLPQGFSALEPLVDLPIGINITRFQTLLALHRSYLTPGDSSSGWTAGAAAYYVGYLQPRTFLLKYNENGTITDAVDCALDPLSETKCTLKSFTVEKGIYQTSNFRVQPTESIVRFPNITNLCPFGEVFNATRFASVYAWNRKRISNCVADYSVLYNSASFSTFKCYGVSPTKLNDLCFTNVYADSFVIRGDEVRQIAPGQTGKIADYNYKLPDDFTGCVIAWNSNNLDSKVGGNYNYLYRLFRKSNLKPFERDISTEIYQAGSTPCNGVEGFNCYFPLQSYGFQPTNGVGYQPYRVVVLSFELLHAPATVCGPKKSTNLVKNKCVNFNFNGLTGTGVLTESNKKFLPFQQFGRDIADTTDAVRDPQTLEILDITPCSFGGVSVITPGTNTSNQVAVLYQDVNCTEVPVAIHADQLTPTWRVYSTGSNVFQTRAGCLIGAEHVNNSYECDIPIGAGICASYQTQTNSPGSASSVASQSIIAYTMSLGAENSVAYSNNSIAIPTNFTISVTTEILPVSMTKTSVDCTMYICGDSTECSNLLLQYGSFCTQLNRALTGIAVEQDKNTQEVFAQVKQIYKTPPIKDFGGFNFSQILPDPSKPSKRSFIEDLLFNKVTLADAGFIKQYGDCLGDIAARDLICAQKFNGLTVLPPLLTDEMIAQYTSALLAGTITSGWTFGAGAALQIPFAMQMAYRFNGIGVTQNVLYENQKLIANQFNSAIGKIQDSLSSTASALGKLQDVVNQNAQALNTLVKQLSSNFGAISSVLNDILSRLDPPEAEVQIDRLITGRLQSLQTYVTQQLIRAAEIRASANLAATKMSECVLGQSKRVDFCGKGYHLMSFPQSAPHGVVFLHVTYVPAQEKNFTTAPAICHDGKAHFPREGVFVSNGTHWFVTQRNFYEPQIITTDNTFVSGNCDVVIGIVNNTVYDPLQPELDSFKEELDKYFKNHTSPDVDLGDISGINASVVNIQKEIDRLNEVAKNLNESLIDLQELGKYEQYIKWPWYIWLGFIAGLIAIVMVTIMLCCMTSCCSCLKGCCSCGSCCKFDEDDSEPVLKGVKLHYT

SEQ ID NO: 53 - protein, 1273 aa, Artificial Sequence
  Description of Artificial Sequence: Synthetic polypeptide
  pKL028
MGVKVLFALICIAVAEAKTTRTQLPPAYTNSFTRGVYYPDKVFRSSVLHSTQDLFLPFFSNVTWFHAIHVSGTNGTKRFDNPVLPFNDGVYFASTEKSNIIRGWIFGTTLDSKTQSLLIVNNATNVVIKVCEFQFCNDPFLGVYYHKNNKSWMESEFRVYSSANNCTFEYVSQPFLMDLEGKQGNFKNLREFVFKNIDGYFKIYSKHTPINLVRDLPQGFSALEPLVDLPIGINITRFQTLLALHRSYLTPGDSSSGWTAGAAAYYVGYLQPRTFLLKYNENGTITDAVDCALDPLSETKCTLKSFTVEKGIYQTSNFRVQPTESIVRFPNITNLCPFGEVFNATRFASVYAWNRKRISNCVADYSVLYNSASFSTFKCYGVSPTKLNDLCFTNVYADSFVIRGDEVRQIAPGQTGKIADYNYKLPDDFTGCVIAWNSNNLDSKVGGNYNYLYRLFRKSNLKPFERDISTEIYQAGSTPCNGVEGFNCYFPLQSYGFQPTNGVGYQPYRVVVLSFELLHAPATVCGPKKSTNLVKNKCVNFNFNGLTGTGVLTESNKKFLPFQQFGRDIADTTDAVRDPQTLEILDITPCSFGGVSVITPGTNTSNQVAVLYQDVNCTEVPVAIHADQLTPTWRVYSTGSNVFQTRAGCLIGAEHVNNSYECDIPIGAGICASYQTQTNSPGSASSVASQSIIAYTMSLGAENSVAYSNNSIAIPTNFTISVTTEILPVSMTKTSVDCTMYICGDSTECSNLLLQYGSFCTQLNRALTGIAVEQDKNTQEVFAQVKQIYKTPPIKDFGGFNFSQILPDPSKPSKRSFIEDLLFNKVTLADAGFIKQYGDCLGDIAARDLICAQKFNGLTVLPPLLTDEMIAQYTSALLAGTITSGWTFGAGAALQIPFAMQMAYRFNGIGVTQNVLYENQKLIANQFNSAIGKIQDSLSSTASALGKLQDVVNQNAQALNTLVKQLSSNFGAISSVLNDILSRLDPPEAEVQIDRLITGRLQSLQTYVTQQLIRAAEIRASANLAATKMSECVLGQSKRVDFCGKGYHLMSFPQSAPHGVVFLHVTYVPAQEKNFTTAPAICHDGKAHFPREGVFVSNGTHWFVTQRNFYEPQIITTDNTFVSGNCDVVIGIVNNTVYDPLQPELDSFKEELDKYFKNHTSPDVDLGDISGINASVVNIQKEIDRLNEVAKNLNESLIDLQELGKYEQYIKWPWYIWLGFIAGLIAIVMVTIMLCCMTSCCSCLKGCCSCGSCCKFDEDDSEPVLKGVKLHYT

SEQ ID NO: 54 - protein, 1281 aa, Artificial Sequence
  Description of Artificial Sequence: Synthetic polypeptide
  pKL029
MPMGSLQPLATLYLLGMLVASVLANLTTRTQLPPAYTNSFTRGVYYPDKVFRSSVLHSTQDLFLPFFSNVTWFHAIHVSGTNGTKRFDNPVLPFNDGVYFASTEKSNIIRGWIFGTTLDSKTQSLLIVNNATNVVIKVCEFQFCNDPFLGVYYHKNNKSWMESEFRVYSSANNCTFEYVSQPFLMDLEGKQGNFKNLREFVFKNIDGYFKIYSKHTPINLVRDLPQGFSALEPLVDLPIGINITRFQTLLALHRSYLTPGDSSSGWTAGAAAYYVGYLQPRTFLLKYNENGTITDAVDCALDPLSETKCTLKSFTVEKGIYQTSNFRVQPTESIVRFPNITNLCPFGEVFNATRFASVYAWNRKRISNCVADYSVLYNSASFSTFKCYGVSPTKLNDLCFTNVYADSFVIRGDEVRQIAPGQTGKIADYNYKLPDDFTGCVIAWNSNNLDSKVGGNYNYLYRLFRKSNLKPFERDISTEIYQAGSTPCNGVEGFNCYFPLQSYGFQPTNGVGYQPYRVVVLSFELLHAPATVCGPKKSTNLVKNKCVNFNFNGLTGTGVLTESNKKFLPFQQFGRDIADTTDAVRDPQTLEILDITPCSFGGVSVITPGTNTSNQVAVLYQDVNCTEVPVAIHADQLTPTWRVYSTGSNVFQTRAGCLIGAEHVNNSYECDIPIGAGICASYQTQTNSPGSASSVASQSIIAYTMSLGAENSVAYSNNSIAIPTNFTISVTTEILPVSMTKTSVDCTMYICGDSTECSNLLLQYGSFCTQLNRALTGIAVEQDKNTQEVFAQVKQIYKTPPIKDFGGFNFSQILPDPSKPSKRSFIEDLLFNKVTLADAGFIKQYGDCLGDIAARDLICAQKFNGLTVLPPLLTDEMIAQYTSALLAGTITSGWTFGAGAALQIPFAMQMAYRFNGIGVTQNVLYENQKLIANQFNSAIGKIQDSLSSTASALGKLQDVVNQNAQALNTLVKQLSSNFGAISSVLNDILSRLDPPEAEVQIDRLITGRLQSLQTYVTQQLIRAAEIRASANLAATKMSECVLGQSKRVDFCGKGYHLMSFPQSAPHGVVFLHVTYVPAQEKNFTTAPAICHDGKAHFPREGVFVSNGTHWFVTQRNFYEPQIITTDNTFVSGNCDVVIGIVNNTVYDPLQPELDSFKEELDKYFKNHTSPDVDLGDISGINASVVNIQKEIDRLNEVAKNLNESLIDLQELGKYEQYIKWPWYIWLGFIAGLIAIVMVTIMLCCMTSCCSCLKGCCSCGSCCKFDEDDSEPVLKGVKLHYT

SEQ ID NO: 55 - protein, 1279 aa, Artificial Sequence
  Description of Artificial Sequence: Synthetic polypeptide
  pKL030
MPMGSLQPLATLYLLGMLVASVLATTRTQLPPAYTNSFTRGVYYPDKVFRSSVLHSTQDLFLPFFSNVTWFHAIHVSGTNGTKRFDNPVLPFNDGVYFASTEKSNIIRGWIFGTTLDSKTQSLLIVNNATNVVIKVCEFQFCNDPFLGVYYHKNNKSWMESEFRVYSSANNCTFEYVSQPFLMDLEGKQGNFKNLREFVFKNIDGYFKIYSKHTPINLVRDLPQGFSALEPLVDLPIGINITRFQTLLALHRSYLTPGDSSSGWTAGAAAYYVGYLQPRTFLLKYNENGTITDAVDCALDPLSETKCTLKSFTVEKGIYQTSNFRVQPTESIVRFPNITNLCPFGEVFNATRFASVYAWNRKRISNCVADYSVLYNSASFSTFKCYGVSPTKLNDLCFTNVYADSFVIRGDEVRQIAPGQTGKIADYNYKLPDDFTGCVIAWNSNNLDSKVGGNYNYLYRLFRKSNLKPFERDISTEIYQAGSTPCNGVEGFNCYFPLQSYGFQPTNGVGYQPYRVVVLSFELLHAPATVCGPKKSTNLVKNKCVNFNFNGLTGTGVLTESNKKFLPFQQFGRDIADTTDAVRDPQTLEILDITPCSFGGVSVITPGTNTSNQVAVLYQDVNCTEVPVAIHADQLTPTWRVYSTGSNVFQTRAGCLIGAEHVNNSYECDIPIGAGICASYQTQTNSPGSASSVASQSIIAYTMSLGAENSVAYSNNSIAIPTNFTISVTTEILPVSMTKTSVDCTMYICGDSTECSNLLLQYGSFCTQLNRALTGIAVEQDKNTQEVFAQVKQIYKTPPIKDFGGFNFSQILPDPSKPSKRSFIEDLLFNKVTLADAGFIKQYGDCLGDIAARDLICAQKFNGLTVLPPLLTDEMIAQYTSALLAGTITSGWTFGAGAALQIPFAMQMAYRFNGIGVTQNVLYENQKLIANQFNSAIGKIQDSLSSTASALGKLQDVVNQNAQALNTLVKQLSSNFGAISSVLNDILSRLDPPEAEVQIDRLITGRLQSLQTYVTQQLIRAAEIRASANLAATKMSECVLGQSKRVDFCGKGYHLMSFPQSAPHGVVFLHVTYVPAQEKNFTTAPAICHDGKAHFPREGVFVSNGTHWFVTQRNFYEPQIITTDNTFVSGNCDVVIGIVNNTVYDPLQPELDSFKEELDKYFKNHTSPDVDLGDISGINASVVNIQKEIDRLNEVAKNLNESLIDLQELGKYEQYIKWPWYIWLGFIAGLIAIVMVTIMLCCMTSCCSCLKGCCSCGSCCKFDEDDSEPVLKGVKLHYT

SEQ ID NO: 56 - protein, 1273 aa, Artificial Sequence
  Description of Artificial Sequence: Synthetic polypeptide
  pKL031
MPLLLLLPLLWAGAAANLTTRTQLPPAYTNSFTRGVYYPDKVFRSSVLHSTQDLFLPFFSNVTWFHAIHVSGTNGTKRFDNPVLPFNDGVYFASTEKSNIIRGWIFGTTLDSKTQSLLIVNNATNVVIKVCEFQFCNDPFLGVYYHKNNKSWMESEFRVYSSANNCTFEYVSQPFLMDLEGKQGNFKNLREFVFKNIDGYFKIYSKHTPINLVRDLPQGFSALEPLVDLPIGINITRFQTLLALHRSYLTPGDSSSGWTAGAAAYYVGYLQPRTFLLKYNENGTITDAVDCALDPLSETKCTLKSFTVEKGIYQTSNFRVQPTESIVRFPNITNLCPFGEVFNATRFASVYAWNRKRISNCVADYSVLYNSASFSTFKCYGVSPTKLNDLCFTNVYADSFVIRGDEVRQIAPGQTGKIADYNYKLPDDFTGCVIAWNSNNLDSKVGGNYNYLYRLFRKSNLKPFERDISTEIYQAGSTPCNGVEGFNCYFPLQSYGFQPTNGVGYQPYRVVVLSFELLHAPATVCGPKKSTNLVKNKCVNFNFNGLTGTGVLTESNKKFLPFQQFGRDIADTTDAVRDPQTLEILDITPCSFGGVSVITPGTNTSNQVAVLYQDVNCTEVPVAIHADQLTPTWRVYSTGSNVFQTRAGCLIGAEHVNNSYECDIPIGAGICASYQTQTNSPGSASSVASQSIIAYTMSLGAENSVAYSNNSIAIPTNFTISVTTEILPVSMTKTSVDCTMYICGDSTECSNLLLQYGSFCTQLNRALTGIAVEQDKNTQEVFAQVKQIYKTPPIKDFGGFNFSQILPDPSKPSKRSFIEDLLFNKVTLADAGFIKQYGDCLGDIAARDLICAQKFNGLTVLPPLLTDEMIAQYTSALLAGTITSGWTFGAGAALQIPFAMQMAYRFNGIGVTQNVLYENQKLIANQFNSAIGKIQDSLSSTASALGKLQDVVNQNAQALNTLVKQLSSNFGAISSVLNDILSRLDPPEAEVQIDRLITGRLQSLQTYVTQQLIRAAEIRASANLAATKMSECVLGQSKRVDFCGKGYHLMSFPQSAPHGVVFLHVTYVPAQEKNFTTAPAICHDGKAHFPREGVFVSNGTHWFVTQRNFYEPQIITTDNTFVSGNCDVVIGIVNNTVYDPLQPELDSFKEELDKYFKNHTSPDVDLGDISGINASVVNIQKEIDRLNEVAKNLNESLIDLQELGKYEQYIKWPWYIWLGFIAGLIAIVMVTIMLCCMTSCCSCLKGCCSCGSCCKFDEDDSEPVLKGVKLHYT

SEQ ID NO: 57 - protein, 1271 aa, Artificial Sequence
  Description of Artificial Sequence: Synthetic polypeptide
  pKL032
MPLLLLLPLLWAGAAATTRTQLPPAYTNSFTRGVYYPDKVFRSSVLHSTQDLFLPFFSNVTWFHAIHVSGTNGTKRFDNPVLPFNDGVYFASTEKSNIIRGWIFGTTLDSKTQSLLIVNNATNVVIKVCEFQFCNDPFLGVYYHKNNKSWMESEFRVYSSANNCTFEYVSQPFLMDLEGKQGNFKNLREFVFKNIDGYFKIYSKHTPINLVRDLPQGFSALEPLVDLPIGINITRFQTLLALHRSYLTPGDSSSGWTAGAAAYYVGYLQPRTFLLKYNENGTITDAVDCALDPLSETKCTLKSFTVEKGIYQTSNFRVQPTESIVRFPNITNLCPFGEVFNATRFASVYAWNRKRISNCVADYSVLYNSASFSTFKCYGVSPTKLNDLCFTNVYADSFVIRGDEVRQIAPGQTGKIADYNYKLPDDFTGCVIAWNSNNLDSKVGGNYNYLYRLFRKSNLKPFERDISTEIYQAGSTPCNGVEGFNCYFPLQSYGFQPTNGVGYQPYRVVVLSFELLHAPATVCGPKKSTNLVKNKCVNFNFNGLTGTGVLTESNKKFLPFQQFGRDIADTTDAVRDPQTLEILDITPCSFGGVSVITPGTNTSNQVAVLYQDVNCTEVPVAIHADQLTPTWRVYSTGSNVFQTRAGCLIGAEHVNNSYECDIPIGAGICASYQTQTNSPGSASSVASQSIIAYTMSLGAENSVAYSNNSIAIPTNFTISVTTEILPVSMTKTSVDCTMYICGDSTECSNLLLQYGSFCTQLNRALTGIAVEQDKNTQEVFAQVKQIYKTPPIKDFGGFNFSQILPDPSKPSKRSFIEDLLFNKVTLADAGFIKQYGDCLGDIAARDLICAQKFNGLTVLPPLLTDEMIAQYTSALLAGTITSGWTFGAGAALQIPFAMQMAYRFNGIGVTQNVLYENQKLIANQFNSAIGKIQDSLSSTASALGKLQDVVNQNAQALNTLVKQLSSNFGAISSVLNDILSRLDPPEAEVQIDRLITGRLQSLQTYVTQQLIRAAEIRASANLAATKMSECVLGQSKRVDFCGKGYHLMSFPQSAPHGVVFLHVTYVPAQEKNFTTAPAICHDGKAHFPREGVFVSNGTHWFVTQRNFYEPQIITTDNTFVSGNCDVVIGIVNNTVYDPLQPELDSFKEELDKYFKNHTSPDVDLGDISGINASVVNIQKEIDRLNEVAKNLNESLIDLQELGKYEQYIKWPWYIWLGFIAGLIAIVMVTIMLCCMTSCCSCLKGCCSCGSCCKFDEDDSEPVLKGVKLHYT

SEQ ID NO: 58 - protein, 1277 aa, Artificial Sequence
  Description of Artificial Sequence: Synthetic polypeptide
  pKL033
MYRMQLLSCIALSLALVTNSNLTTRTQLPPAYTNSFTRGVYYPDKVFRSSVLHSTQDLFLPFFSNVTWFHAIHVSGTNGTKRFDNPVLPFNDGVYFASTEKSNIIRGWIFGTTLDSKTQSLLIVNNATNVVIKVCEFQFCNDPFLGVYYHKNNKSWMESEFRVYSSANNCTFEYVSQPFLMDLEGKQGNFKNLREFVFKNIDGYFKIYSKHTPINLVRDLPQGFSALEPLVDLPIGINITRFQTLLALHRSYLTPGDSSSGWTAGAAAYYVGYLQPRTFLLKYNENGTITDAVDCALDPLSETKCTLKSFTVEKGIYQTSNFRVQPTESIVRFPNITNLCPFGEVFNATRFASVYAWNRKRISNCVADYSVLYNSASFSTFKCYGVSPTKLNDLCFTNVYADSFVIRGDEVRQIAPGQTGKIADYNYKLPDDFTGCVIAWNSNNLDSKVGGNYNYLYRLFRKSNLKPFERDISTEIYQAGSTPCNGVEGFNCYFPLQSYGFQPTNGVGYQPYRVVVLSFELLHAPATVCGPKKSTNLVKNKCVNFNFNGLTGTGVLTESNKKFLPFQQFGRDIADTTDAVRDPQTLEILDITPCSFGGVSVITPGTNTSNQVAVLYQDVNCTEVPVAIHADQLTPTWRVYSTGSNVFQTRAGCLIGAEHVNNSYECDIPIGAGICASYQTQTNSPGSASSVASQSIIAYTMSLGAENSVAYSNNSIAIPTNFTISVTTEILPVSMTKTSVDCTMYICGDSTECSNLLLQYGSFCTQLNRALTGIAVEQDKNTQEVFAQVKQIYKTPPIKDFGGFNFSQILPDPSKPSKRSFIEDLLFNKVTLADAGFIKQYGDCLGDIAARDLICAQKFNGLTVLPPLLTDEMIAQYTSALLAGTITSGWTFGAGAALQIPFAMQMAYRFNGIGVTQNVLYENQKLIANQFNSAIGKIQDSLSSTASALGKLQDVVNQNAQALNTLVKQLSSNFGAISSVLNDILSRLDPPEAEVQIDRLITGRLQSLQTYVTQQLIRAAEIRASANLAATKMSECVLGQSKRVDFCGKGYHLMSFPQSAPHGVVFLHVTYVPAQEKNFTTAPAICHDGKAHFPREGVFVSNGTHWFVTQRNFYEPQIITTDNTFVSGNCDVVIGIVNNTVYDPLQPELDSFKEELDKYFKNHTSPDVDLGDISGINASVVNIQKEIDRLNEVAKNLNESLIDLQELGKYEQYIKWPWYIWLGFIAGLIAIVMVTIMLCCMTSCCSCLKGCCSCGSCCKFDEDDSEPVLKGVKLHYT

SEQ ID NO: 59 - protein, 1275 aa, Artificial Sequence
  Description of Artificial Sequence: Synthetic polypeptide
  pKL034
MYRMQLLSCIALSLALVTNSTTRTQLPPAYTNSFTRGVYYPDKVFRSSVLHSTQDLFLPFFSNVTWFHAIHVSGTNGTKRFDNPVLPFNDGVYFASTEKSNIIRGWIFGTTLDSKTQSLLIVNNATNVVIKVCEFQFCNDPFLGVYYHKNNKSWMESEFRVYSSANNCTFEYVSQPFLMDLEGKQGNFKNLREFVFKNIDGYFKIYSKHTPINLVRDLPQGFSALEPLVDLPIGINITRFQTLLALHRSYLTPGDSSSGWTAGAAAYYVGYLQPRTFLLKYNENGTITDAVDCALDPLSETKCTLKSFTVEKGIYQTSNFRVQPTESIVRFPNITNLCPFGEVFNATRFASVYAWNRKRISNCVADYSVLYNSASFSTFKCYGVSPTKLNDLCFTNVYADSFVIRGDEVRQIAPGQTGKIADYNYKLPDDFTGCVIAWNSNNLDSKVGGNYNYLYRLFRKSNLKPFERDISTEIYQAGSTPCNGVEGFNCYFPLQSYGFQPTNGVGYQPYRVVVLSFELLHAPATVCGPKKSTNLVKNKCVNFNFNGLTGTGVLTESNKKFLPFQQFGRDIADTTDAVRDPQTLEILDITPCSFGGVSVITPGTNTSNQVAVLYQDVNCTEVPVAIHADQLTPTWRVYSTGSNVFQTRAGCLIGAEHVNNSYECDIPIGAGICASYQTQTNSPGSASSVASQSIIAYTMSLGAENSVAYSNNSIAIPTNFTISVTTEILPVSMTKTSVDCTMYICGDSTECSNLLLQYGSFCTQLNRALTGIAVEQDKNTQEVFAQVKQIYKTPPIKDFGGFNFSQILPDPSKPSKRSFIEDLLFNKVTLADAGFIKQYGDCLGDIAARDLICAQKFNGLTVLPPLLTDEMIAQYTSALLAGTITSGWTFGAGAALQIPFAMQMAYRFNGIGVTQNVLYENQKLIANQFNSAIGKIQDSLSSTASALGKLQDVVNQNAQALNTLVKQLSSNFGAISSVLNDILSRLDPPEAEVQIDRLITGRLQSLQTYVTQQLIRAAEIRASANLAATKMSECVLGQSKRVDFCGKGYHLMSFPQSAPHGVVFLHVTYVPAQEKNFTTAPAICHDGKAHFPREGVFVSNGTHWFVTQRNFYEPQIITTDNTFVSGNCDVVIGIVNNTVYDPLQPELDSFKEELDKYFKNHTSPDVDLGDISGINASVVNIQKEIDRLNEVAKNLNESLIDLQELGKYEQYIKWPWYIWLGFIAGLIAIVMVTIMLCCMTSCCSCLKGCCSCGSCCKFDEDDSEPVLKGVKLHYT

SEQ ID NO: 60 - protein, 1275 aa, Artificial Sequence
  Description of Artificial Sequence: Synthetic polypeptide
  pKL035
MDWTWILFLVAAATRVHSNLTTRTQLPPAYTNSFTRGVYYPDKVFRSSVLHSTQDLFLPFFSNVTWFHAIHVSGTNGTKRFDNPVLPFNDGVYFASTEKSNIIRGWIFGTTLDSKTQSLLIVNNATNVVIKVCEFQFCNDPFLGVYYHKNNKSWMESEFRVYSSANNCTFEYVSQPFLMDLEGKQGNFKNLREFVFKNIDGYFKIYSKHTPINLVRDLPQGFSALEPLVDLPIGINITRFQTLLALHRSYLTPGDSSSGWTAGAAAYYVGYLQPRTFLLKYNENGTITDAVDCALDPLSETKCTLKSFTVEKGIYQTSNFRVQPTESIVRFPNITNLCPFGEVFNATRFASVYAWNRKRISNCVADYSVLYNSASFSTFKCYGVSPTKLNDLCFTNVYADSFVIRGDEVRQIAPGQTGKIADYNYKLPDDFTGCVIAWNSNNLDSKVGGNYNYLYRLFRKSNLKPFERDISTEIYQAGSTPCNGVEGFNCYFPLQSYGFQPTNGVGYQPYRVVVLSFELLHAPATVCGPKKSTNLVKNKCVNFNFNGLTGTGVLTESNKKFLPFQQFGRDIADTTDAVRDPQTLEILDITPCSFGGVSVITPGTNTSNQVAVLYQDVNCTEVPVAIHADQLTPTWRVYSTGSNVFQTRAGCLIGAEHVNNSYECDIPIGAGICASYQTQTNSPGSASSVASQSIIAYTMSLGAENSVAYSNNSIAIPTNFTISVTTEILPVSMTKTSVDCTMYICGDSTECSNLLLQYGSFCTQLNRALTGIAVEQDKNTQEVFAQVKQIYKTPPIKDFGGFNFSQILPDPSKPSKRSFIEDLLFNKVTLADAGFIKQYGDCLGDIAARDLICAQKFNGLTVLPPLLTDEMIAQYTSALLAGTITSGWTFGAGAALQIPFAMQMAYRFNGIGVTQNVLYENQKLIANQFNSAIGKIQDSLSSTASALGKLQDVVNQNAQALNTLVKQLSSNFGAISSVLNDILSRLDPPEAEVQIDRLITGRLQSLQTYVTQQLIRAAEIRASANLAATKMSECVLGQSKRVDFCGKGYHLMSFPQSAPHGVVFLHVTYVPAQEKNFTTAPAICHDGKAHFPREGVFVSNGTHWFVTQRNFYEPQIITTDNTFVSGNCDVVIGIVNNTVYDPLQPELDSFKEELDKYFKNHTSPDVDLGDISGINASVVNIQKEIDRLNEVAKNLNESLIDLQELGKYEQYIKWPWYIWLGFIAGLIAIVMVTIMLCCMTSCCSCLKGCCSCGSCCKFDEDDSEPVLKGVKLHYT

SEQ ID NO: 61 - protein, 1273 aa, Artificial Sequence
  Description of Artificial Sequence: Synthetic polypeptide
  pKL036
MDWTWILFLVAAATRVHSTTRTQLPPAYTNSFTRGVYYPDKVFRSSVLHSTQDLFLPFFSNVTWFHAIHVSGTNGTKRFDNPVLPFNDGVYFASTEKSNIIRGWIFGTTLDSKTQSLLIVNNATNVVIKVCEFQFCNDPFLGVYYHKNNKSWMESEFRVYSSANNCTFEYVSQPFLMDLEGKQGNFKNLREFVFKNIDGYFKIYSKHTPINLVRDLPQGFSALEPLVDLPIGINITRFQTLLALHRSYLTPGDSSSGWTAGAAAYYVGYLQPRTFLLKYNENGTITDAVDCALDPLSETKCTLKSFTVEKGIYQTSNFRVQPTESIVRFPNITNLCPFGEVFNATRFASVYAWNRKRISNCVADYSVLYNSASFSTFKCYGVSPTKLNDLCFTNVYADSFVIRGDEVRQIAPGQTGKIADYNYKLPDDFTGCVIAWNSNNLDSKVGGNYNYLYRLFRKSNLKPFERDISTEIYQAGSTPCNGVEGFNCYFPLQSYGFQPTNGVGYQPYRVVVLSFELLHAPATVCGPKKSTNLVKNKCVNFNFNGLTGTGVLTESNKKFLPFQQFGRDIADTTDAVRDPQTLEILDITPCSFGGVSVITPGTNTSNQVAVLYQDVNCTEVPVAIHADQLTPTWRVYSTGSNVFQTRAGCLIGAEHVNNSYECDIPIGAGICASYQTQTNSPGSASSVASQSIIAYTMSLGAENSVAYSNNSIAIPTNFTISVTTEILPVSMTKTSVDCTMYICGDSTECSNLLLQYGSFCTQLNRALTGIAVEQDKNTQEVFAQVKQIYKTPPIKDFGGFNFSQILPDPSKPSKRSFIEDLLFNKVTLADAGFIKQYGDCLGDIAARDLICAQKFNGLTVLPPLLTDEMIAQYTSALLAGTITSGWTFGAGAALQIPFAMQMAYRFNGIGVTQNVLYENQKLIANQFNSAIGKIQDSLSSTASALGKLQDVVNQNAQALNTLVKQLSSNFGAISSVLNDILSRLDPPEAEVQIDRLITGRLQSLQTYVTQQLIRAAEIRASANLAATKMSECVLGQSKRVDFCGKGYHLMSFPQSAPHGVVFLHVTYVPAQEKNFTTAPAICHDGKAHFPREGVFVSNGTHWFVTQRNFYEPQIITTDNTFVSGNCDVVIGIVNNTVYDPLQPELDSFKEELDKYFKNHTSPDVDLGDISGINASVVNIQKEIDRLNEVAKNLNESLIDLQELGKYEQYIKWPWYIWLGFIAGLIAIVMVTIMLCCMTSCCSCLKGCCSCGSCCKFDEDDSEPVLKGVKLHYT

SEQ ID NO: 62 - protein, 1277 aa, Artificial Sequence
  Description of Artificial Sequence: Synthetic polypeptide
  pKL037
METPAELLFLLLLWLPDTTGNLTTRTQLPPAYTNSFTRGVYYPDKVFRSSVLHSTQDLFLPFFSNVTWFHAIHVSGTNGTKRFDNPVLPFNDGVYFASTEKSNIIRGWIFGTTLDSKTQSLLIVNNATNVVIKVCEFQFCNDPFLGVYYHKNNKSWMESEFRVYSSANNCTFEYVSQPFLMDLEGKQGNFKNLREFVFKNIDGYFKIYSKHTPINLVRDLPQGFSALEPLVDLPIGINITRFQTLLALHRSYLTPGDSSSGWTAGAAAYYVGYLQPRTFLLKYNENGTITDAVDCALDPLSETKCTLKSFTVEKGIYQTSNFRVQPTESIVRFPNITNLCPFGEVFNATRFASVYAWNRKRISNCVADYSVLYNSASFSTFKCYGVSPTKLNDLCFTNVYADSFVIRGDEVRQIAPGQTGKIADYNYKLPDDFTGCVIAWNSNNLDSKVGGNYNYLYRLFRKSNLKPFERDISTEIYQAGSTPCNGVEGFNCYFPLQSYGFQPTNGVGYQPYRVVVLSFELLHAPATVCGPKKSTNLVKNKCVNFNFNGLTGTGVLTESNKKFLPFQQFGRDIADTTDAVRDPQTLEILDITPCSFGGVSVITPGTNTSNQVAVLYQDVNCTEVPVAIHADQLTPTWRVYSTGSNVFQTRAGCLIGAEHVNNSYECDIPIGAGICASYQTQTNSPGSASSVASQSIIAYTMSLGAENSVAYSNNSIAIPTNFTISVTTEILPVSMTKTSVDCTMYICGDSTECSNLLLQYGSFCTQLNRALTGIAVEQDKNTQEVFAQVKQIYKTPPIKDFGGFNFSQILPDPSKPSKRSFIEDLLFNKVTLADAGFIKQYGDCLGDIAARDLICAQKFNGLTVLPPLLTDEMIAQYTSALLAGTITSGWTFGAGAALQIPFAMQMAYRFNGIGVTQNVLYENQKLIANQFNSAIGKIQDSLSSTASALGKLQDVVNQNAQALNTLVKQLSSNFGAISSVLNDILSRLDPPEAEVQIDRLITGRLQSLQTYVTQQLIRAAEIRASANLAATKMSECVLGQSKRVDFCGKGYHLMSFPQSAPHGVVFLHVTYVPAQEKNFTTAPAICHDGKAHFPREGVFVSNGTHWFVTQRNFYEPQIITTDNTFVSGNCDVVIGIVNNTVYDPLQPELDSFKEELDKYFKNHTSPDVDLGDISGINASVVNIQKEIDRLNEVAKNLNESLIDLQELGKYEQYIKWPWYIWLGFIAGLIAIVMVTIMLCCMTSCCSCLKGCCSCGSCCKFDEDDSEPVLKGVKLHYT

SEQ ID NO: 63 - protein, 1275 aa, Artificial Sequence
  Description of Artificial Sequence: Synthetic polypeptide
  pKL038
METPAELLFLLLLWLPDTTGTTRTQLPPAYTNSFTRGVYYPDKVFRSSVLHSTQDLFLPFFSNVTWFHAIHVSGTNGTKRFDNPVLPFNDGVYFASTEKSNIIRGWIFGTTLDSKTQSLLIVNNATNVVIKVCEFQFCNDPFLGVYYHKNNKSWMESEFRVYSSANNCTFEYVSQPFLMDLEGKQGNFKNLREFVFKNIDGYFKIYSKHTPINLVRDLPQGFSALEPLVDLPIGINITRFQTLLALHRSYLTPGDSSSGWTAGAAAYYVGYLQPRTFLLKYNENGTITDAVDCALDPLSETKCTLKSFTVEKGIYQTSNFRVQPTESIVRFPNITNLCPFGEVFNATRFASVYAWNRKRISNCVADYSVLYNSASFSTFKCYGVSPTKLNDLCFTNVYADSFVIRGDEVRQIAPGQTGKIADYNYKLPDDFTGCVIAWNSNNLDSKVGGNYNYLYRLFRKSNLKPFERDISTEIYQAGSTPCNGVEGFNCYFPLQSYGFQPTNGVGYQPYRVVVLSFELLHAPATVCGPKKSTNLVKNKCVNFNFNGLTGTGVLTESNKKFLPFQQFGRDIADTTDAVRDPQTLEILDITPCSFGGVSVITPGTNTSNQVAVLYQDVNCTEVPVAIHADQLTPTWRVYSTGSNVFQTRAGCLIGAEHVNNSYECDIPIGAGICASYQTQTNSPGSASSVASQSIIAYTMSLGAENSVAYSNNSIAIPTNFTISVTTEILPVSMTKTSVDCTMYICGDSTECSNLLLQYGSFCTQLNRALTGIAVEQDKNTQEVFAQVKQIYKTPPIKDFGGFNFSQILPDPSKPSKRSFIEDLLFNKVTLADAGFIKQYGDCLGDIAARDLICAQKFNGLTVLPPLLTDEMIAQYTSALLAGTITSGWTFGAGAALQIPFAMQMAYRFNGIGVTQNVLYENQKLIANQFNSAIGKIQDSLSSTASALGKLQDVVNQNAQALNTLVKQLSSNFGAISSVLNDILSRLDPPEAEVQIDRLITGRLQSLQTYVTQQLIRAAEIRASANLAATKMSECVLGQSKRVDFCGKGYHLMSFPQSAPHGVVFLHVTYVPAQEKNFTTAPAICHDGKAHFPREGVFVSNGTHWFVTQRNFYEPQIITTDNTFVSGNCDVVIGIVNNTVYDPLQPELDSFKEELDKYFKNHTSPDVDLGDISGINASVVNIQKEIDRLNEVAKNLNESLIDLQELGKYEQYIKWPWYIWLGFIAGLIAIVMVTIMLCCMTSCCSCLKGCCSCGSCCKFDEDDSEPVLKGVKLHYT

SEQ ID NO: 64 - protein, 1278 aa, Artificial Sequence
  Description of Artificial Sequence: Synthetic polypeptide
  pKL039
MNEGSIMWLASLAVVIACAGANLTTRTQLPPAYTNSFTRGVYYPDKVFRSSVLHSTQDLFLPFFSNVTWFHAIHVSGTNGTKRFDNPVLPFNDGVYFASTEKSNIIRGWIFGTTLDSKTQSLLIVNNATNVVIKVCEFQFCNDPFLGVYYHKNNKSWMESEFRVYSSANNCTFEYVSQPFLMDLEGKQGNFKNLREFVFKNIDGYFKIYSKHTPINLVRDLPQGFSALEPLVDLPIGINITRFQTLLALHRSYLTPGDSSSGWTAGAAAYYVGYLQPRTFLLKYNENGTITDAVDCALDPLSETKCTLKSFTVEKGIYQTSNFRVQPTESIVRFPNITNLCPFGEVFNATRFASVYAWNRKRISNCVADYSVLYNSASFSTFKCYGVSPTKLNDLCFTNVYADSFVIRGDEVRQIAPGQTGKIADYNYKLPDDFTGCVIAWNSNNLDSKVGGNYNYLYRLFRKSNLKPFERDISTEIYQAGSTPCNGVEGFNCYFPLQSYGFQPTNGVGYQPYRVVVLSFELLHAPATVCGPKKSTNLVKNKCVNFNFNGLTGTGVLTESNKKFLPFQQFGRDIADTTDAVRDPQTLEILDITPCSFGGVSVITPGTNTSNQVAVLYQDVNCTEVPVAIHADQLTPTWRVYSTGSNVFQTRAGCLIGAEHVNNSYECDIPIGAGICASYQTQTNSPGSASSVASQSIIAYTMSLGAENSVAYSNNSIAIPTNFTISVTTEILPVSMTKTSVDCTMYICGDSTECSNLLLQYGSFCTQLNRALTGIAVEQDKNTQEVFAQVKQIYKTPPIKDFGGFNFSQILPDPSKPSKRSFIEDLLFNKVTLADAGFIKQYGDCLGDIAARDLICAQKFNGLTVLPPLLTDEMIAQYTSALLAGTITSGWTFGAGAALQIPFAMQMAYRFNGIGVTQNVLYENQKLIANQFNSAIGKIQDSLSSTASALGKLQDVVNQNAQALNTLVKQLSSNFGAISSVLNDILSRLDPPEAEVQIDRLITGRLQSLQTYVTQQLIRAAEIRASANLAATKMSECVLGQSKRVDFCGKGYHLMSFPQSAPHGVVFLHVTYVPAQEKNFTTAPAICHDGKAHFPREGVFVSNGTHWFVTQRNFYEPQIITTDNTFVSGNCDVVIGIVNNTVYDPLQPELDSFKEELDKYFKNHTSPDVDLGDISGINASVVNIQKEIDRLNEVAKNLNESLIDLQELGKYEQYIKWPWYIWLGFIAGLIAIVMVTIMLCCMTSCCSCLKGCCSCGSCCKFDEDDSEPVLKGVKLHYT

SEQ ID NO: 65 - protein, 1276 aa, Artificial Sequence
  Description of Artificial Sequence: Synthetic polypeptide
  pKL040
MNEGSIMWLASLAVVIACAGATTRTQLPPAYTNSFTRGVYYPDKVFRSSVLHSTQDLFLPFFSNVTWFHAIHVSGTNGTKRFDNPVLPFNDGVYFASTEKSNIIRGWIFGTTLDSKTQSLLIVNNATNVVIKVCEFQFCNDPFLGVYYHKNNKSWMESEFRVYSSANNCTFEYVSQPFLMDLEGKQGNFKNLREFVFKNIDGYFKIYSKHTPINLVRDLPQGFSALEPLVDLPIGINITRFQTLLALHRSYLTPGDSSSGWTAGAAAYYVGYLQPRTFLLKYNENGTITDAVDCALDPLSETKCTLKSFTVEKGIYQTSNFRVQPTESIVRFPNITNLCPFGEVFNATRFASVYAWNRKRISNCVADYSVLYNSASFSTFKCYGVSPTKLNDLCFTNVYADSFVIRGDEVRQIAPGQTGKIADYNYKLPDDFTGCVIAWNSNNLDSKVGGNYNYLYRLFRKSNLKPFERDISTEIYQAGSTPCNGVEGFNCYFPLQSYGFQPTNGVGYQPYRVVVLSFELLHAPATVCGPKKSTNLVKNKCVNFNFNGLTGTGVLTESNKKFLPFQQFGRDIADTTDAVRDPQTLEILDITPCSFGGVSVITPGTNTSNQVAVLYQDVNCTEVPVAIHADQLTPTWRVYSTGSNVFQTRAGCLIGAEHVNNSYECDIPIGAGICASYQTQTNSPGSASSVASQSIIAYTMSLGAENSVAYSNNSIAIPTNFTISVTTEILPVSMTKTSVDCTMYICGDSTECSNLLLQYGSFCTQLNRALTGIAVEQDKNTQEVFAQVKQIYKTPPIKDFGGFNFSQILPDPSKPSKRSFIEDLLFNKVTLADAGFIKQYGDCLGDIAARDLICAQKFNGLTVLPPLLTDEMIAQYTSALLAGTITSGWTFGAGAALQIPFAMQMAYRFNGIGVTQNVLYENQKLIANQFNSAIGKIQDSLSSTASALGKLQDVVNQNAQALNTLVKQLSSNFGAISSVLNDILSRLDPPEAEVQIDRLITGRLQSLQTYVTQQLIRAAEIRASANLAATKMSECVLGQSKRVDFCGKGYHLMSFPQSAPHGVVFLHVTYVPAQEKNFTTAPAICHDGKAHFPREGVFVSNGTHWFVTQRNFYEPQIITTDNTFVSGNCDVVIGIVNNTVYDPLQPELDSFKEELDKYFKNHTSPDVDLGDISGINASVVNIQKEIDRLNEVAKNLNESLIDLQELGKYEQYIKWPWYIWLGFIAGLIAIVMVTIMLCCMTSCCSCLKGCCSCGSCCKFDEDDSEPVLKGVKLHYT

SEQ ID NO: 66 - protein, 1287 aa, Artificial Sequence
  Description of Artificial Sequence: Synthetic polypeptide
  pKL041
MGRKQNKRGGNEGSIMWLASLAVVIACAGANLTTRTQLPPAYTNSFTRGVYYPDKVFRSSVLHSTQDLFLPFFSNVTWFHAIHVSGTNGTKRFDNPVLPFNDGVYFASTEKSNIIRGWIFGTTLDSKTQSLLIVNNATNVVIKVCEFQFCNDPFLGVYYHKNNKSWMESEFRVYSSANNCTFEYVSQPFLMDLEGKQGNFKNLREFVFKNIDGYFKIYSKHTPINLVRDLPQGFSALEPLVDLPIGINITRFQTLLALHRSYLTPGDSSSGWTAGAAAYYVGYLQPRTFLLKYNENGTITDAVDCALDPLSETKCTLKSFTVEKGIYQTSNFRVQPTESIVRFPNITNLCPFGEVFNATRFASVYAWNRKRISNCVADYSVLYNSASFSTFKCYGVSPTKLNDLCFTNVYADSFVIRGDEVRQIAPGQTGKIADYNYKLPDDFTGCVIAWNSNNLDSKVGGNYNYLYRLFRKSNLKPFERDISTEIYQAGSTPCNGVEGFNCYFPLQSYGFQPTNGVGYQPYRVVVLSFELLHAPATVCGPKKSTNLVKNKCVNFNFNGLTGTGVLTESNKKFLPFQQFGRDIADTTDAVRDPQTLEILDITPCSFGGVSVITPGTNTSNQVAVLYQDVNCTEVPVAIHADQLTPTWRVYSTGSNVFQTRAGCLIGAEHVNNSYECDIPIGAGICASYQTQTNSPGSASSVASQSIIAYTMSLGAENSVAYSNNSIAIPTNFTISVTTEILPVSMTKTSVDCTMYICGDSTECSNLLLQYGSFCTQLNRALTGIAVEQDKNTQEVFAQVKQIYKTPPIKDFGGFNFSQILPDPSKPSKRSFIEDLLFNKVTLADAGFIKQYGDCLGDIAARDLICAQKFNGLTVLPPLLTDEMIAQYTSALLAGTITSGWTFGAGAALQIPFAMQMAYRFNGIGVTQNVLYENQKLIANQFNSAIGKIQDSLSSTASALGKLQDVVNQNAQALNTLVKQLSSNFGAISSVLNDILSRLDPPEAEVQIDRLITGRLQSLQTYVTQQLIRAAEIRASANLAATKMSECVLGQSKRVDFCGKGYHLMSFPQSAPHGVVFLHVTYVPAQEKNFTTAPAICHDGKAHFPREGVFVSNGTHWFVTQRNFYEPQIITTDNTFVSGNCDVVIGIVNNTVYDPLQPELDSFKEELDKYFKNHTSPDVDLGDISGINASVVNIQKEIDRLNEVAKNLNESLIDLQELGKYEQYIKWPWYIWLGFIAGLIAIVMVTIMLCCMTSCCSCLKGCCSCGSCCKFDEDDSEPVLKGVKLHYT

SEQ ID NO: 67 - protein, 1285 aa, Artificial Sequence
  Description of Artificial Sequence: Synthetic polypeptide
  pKL042
MGRKQNKRGGNEGSIMWLASLAVVIACAGATTRTQLPPAYTNSFTRGVYYPDKVFRSSVLHSTQDLFLPFFSNVTWFHAIHVSGTNGTKRFDNPVLPFNDGVYFASTEKSNIIRGWIFGTTLDSKTQSLLIVNNATNVVIKVCEFQFCNDPFLGVYYHKNNKSWMESEFRVYSSANNCTFEYVSQPFLMDLEGKQGNFKNLREFVFKNIDGYFKIYSKHTPINLVRDLPQGFSALEPLVDLPIGINITRFQTLLALHRSYLTPGDSSSGWTAGAAAYYVGYLQPRTFLLKYNENGTITDAVDCALDPLSETKCTLKSFTVEKGIYQTSNFRVQPTESIVRFPNITNLCPFGEVFNATRFASVYAWNRKRISNCVADYSVLYNSASFSTFKCYGVSPTKLNDLCFTNVYADSFVIRGDEVRQIAPGQTGKIADYNYKLPDDFTGCVIAWNSNNLDSKVGGNYNYLYRLFRKSNLKPFERDISTEIYQAGSTPCNGVEGFNCYFPLQSYGFQPTNGVGYQPYRVVVLSFELLHAPATVCGPKKSTNLVKNKCVNFNFNGLTGTGVLTESNKKFLPFQQFGRDIADTTDAVRDPQTLEILDITPCSFGGVSVITPGTNTSNQVAVLYQDVNCTEVPVAIHADQLTPTWRVYSTGSNVFQTRAGCLIGAEHVNNSYECDIPIGAGICASYQTQTNSPGSASSVASQSIIAYTMSLGAENSVAYSNNSIAIPTNFTISVTTEILPVSMTKTSVDCTMYICGDSTECSNLLLQYGSFCTQLNRALTGIAVEQDKNTQEVFAQVKQIYKTPPIKDFGGFNFSQILPDPSKPSKRSFIEDLLFNKVTLADAGFIKQYGDCLGDIAARDLICAQKFNGLTVLPPLLTDEMIAQYTSALLAGTITSGWTFGAGAALQIPFAMQMAYRFNGIGVTQNVLYENQKLIANQFNSAIGKIQDSLSSTASALGKLQDVVNQNAQALNTLVKQLSSNFGAISSVLNDILSRLDPPEAEVQIDRLITGRLQSLQTYVTQQLIRAAEIRASANLAATKMSECVLGQSKRVDFCGKGYHLMSFPQSAPHGVVFLHVTYVPAQEKNFTTAPAICHDGKAHFPREGVFVSNGTHWFVTQRNFYEPQIITTDNTFVSGNCDVVIGIVNNTVYDPLQPELDSFKEELDKYFKNHTSPDVDLGDISGINASVVNIQKEIDRLNEVAKNLNESLIDLQELGKYEQYIKWPWYIWLGFIAGLIAIVMVTIMLCCMTSCCSCLKGCCSCGSCCKFDEDDSEPVLKGVKLHYT

SEQ ID NO: 68 - protein, 1278 aa, Artificial Sequence
  Description of Artificial Sequence: Synthetic polypeptide
  pKL043
METDTLLLWVLLLWVPGSTGDNLTTRTQLPPAYTNSFTRGVYYPDKVFRSSVLHSTQDLFLPFFSNVTWFHAIHVSGTNGTKRFDNPVLPFNDGVYFASTEKSNIIRGWIFGTTLDSKTQSLLIVNNATNVVIKVCEFQFCNDPFLGVYYHKNNKSWMESEFRVYSSANNCTFEYVSQPFLMDLEGKQGNFKNLREFVFKNIDGYFKIYSKHTPINLVRDLPQGFSALEPLVDLPIGINITRFQTLLALHRSYLTPGDSSSGWTAGAAAYYVGYLQPRTFLLKYNENGTITDAVDCALDPLSETKCTLKSFTVEKGIYQTSNFRVQPTESIVRFPNITNLCPFGEVFNATRFASVYAWNRKRISNCVADYSVLYNSASFSTFKCYGVSPTKLNDLCFTNVYADSFVIRGDEVRQIAPGQTGKIADYNYKLPDDFTGCVIAWNSNNLDSKVGGNYNYLYRLFRKSNLKPFERDISTEIYQAGSTPCNGVEGFNCYFPLQSYGFQPTNGVGYQPYRVVVLSFELLHAPATVCGPKKSTNLVKNKCVNFNFNGLTGTGVLTESNKKFLPFQQFGRDIADTTDAVRDPQTLEILDITPCSFGGVSVITPGTNTSNQVAVLYQDVNCTEVPVAIHADQLTPTWRVYSTGSNVFQTRAGCLIGAEHVNNSYECDIPIGAGICASYQTQTNSPGSASSVASQSIIAYTMSLGAENSVAYSNNSIAIPTNFTISVTTEILPVSMTKTSVDCTMYICGDSTECSNLLLQYGSFCTQLNRALTGIAVEQDKNTQEVFAQVKQIYKTPPIKDFGGFNFSQILPDPSKPSKRSFIEDLLFNKVTLADAGFIKQYGDCLGDIAARDLICAQKFNGLTVLPPLLTDEMIAQYTSALLAGTITSGWTFGAGAALQIPFAMQMAYRFNGIGVTQNVLYENQKLIANQFNSAIGKIQDSLSSTASALGKLQDVVNQNAQALNTLVKQLSSNFGAISSVLNDILSRLDPPEAEVQIDRLITGRLQSLQTYVTQQLIRAAEIRASANLAATKMSECVLGQSKRVDFCGKGYHLMSFPQSAPHGVVFLHVTYVPAQEKNFTTAPAICHDGKAHFPREGVFVSNGTHWFVTQRNFYEPQIITTDNTFVSGNCDVVIGIVNNTVYDPLQPELDSFKEELDKYFKNHTSPDVDLGDISGINASVVNIQKEIDRLNEVAKNLNESLIDLQELGKYEQYIKWPWYIWLGFIAGLIAIVMVTIMLCCMTSCCSCLKGCCSCGSCCKFDEDDSEPVLKGVKLHYT

SEQ ID NO: 69 - protein, 1276 aa, Artificial Sequence
  Description of Artificial Sequence: Synthetic polypeptide
  pKL044
METDTLLLWVLLLWVPGSTGDTTRTQLPPAYTNSFTRGVYYPDKVFRSSVLHSTQDLFLPFFSNVTWFHAIHVSGTNGTKRFDNPVLPFNDGVYFASTEKSNIIRGWIFGTTLDSKTQSLLIVNNATNVVIKVCEFQFCNDPFLGVYYHKNNKSWMESEFRVYSSANNCTFEYVSQPFLMDLEGKQGNFKNLREFVFKNIDGYFKIYSKHTPINLVRDLPQGFSALEPLVDLPIGINITRFQTLLALHRSYLTPGDSSSGWTAGAAAYYVGYLQPRTFLLKYNENGTITDAVDCALDPLSETKCTLKSFTVEKGIYQTSNFRVQPTESIVRFPNITNLCPFGEVFNATRFASVYAWNRKRISNCVADYSVLYNSASFSTFKCYGVSPTKLNDLCFTNVYADSFVIRGDEVRQIAPGQTGKIADYNYKLPDDFTGCVIAWNSNNLDSKVGGNYNYLYRLFRKSNLKPFERDISTEIYQAGSTPCNGVEGFNCYFPLQSYGFQPTNGVGYQPYRVVVLSFELLHAPATVCGPKKSTNLVKNKCVNFNFNGLTGTGVLTESNKKFLPFQQFGRDIADTTDAVRDPQTLEILDITPCSFGGVSVITPGTNTSNQVAVLYQDVNCTEVPVAIHADQLTPTWRVYSTGSNVFQTRAGCLIGAEHVNNSYECDIPIGAGICASYQTQTNSPGSASSVASQSIIAYTMSLGAENSVAYSNNSIAIPTNFTISVTTEILPVSMTKTSVDCTMYICGDSTECSNLLLQYGSFCTQLNRALTGIAVEQDKNTQEVFAQVKQIYKTPPIKDFGGFNFSQILPDPSKPSKRSFIEDLLFNKVTLADAGFIKQYGDCLGDIAARDLICAQKFNGLTVLPPLLTDEMIAQYTSALLAGTITSGWTFGAGAALQIPFAMQMAYRFNGIGVTQNVLYENQKLIANQFNSAIGKIQDSLSSTASALGKLQDVVNQNAQALNTLVKQLSSNFGAISSVLNDILSRLDPPEAEVQIDRLITGRLQSLQTYVTQQLIRAAEIRASANLAATKMSECVLGQSKRVDFCGKGYHLMSFPQSAPHGVVFLHVTYVPAQEKNFTTAPAICHDGKAHFPREGVFVSNGTHWFVTQRNFYEPQIITTDNTFVSGNCDVVIGIVNNTVYDPLQPELDSFKEELDKYFKNHTSPDVDLGDISGINASVVNIQKEIDRLNEVAKNLNESLIDLQELGKYEQYIKWPWYIWLGFIAGLIAIVMVTIMLCCMTSCCSCLKGCCSCGSCCKFDEDDSEPVLKGVKLHYT

SEQ ID NO: 70 - protein, 1278 aa, Artificial Sequence
  Description of Artificial Sequence: Synthetic polypeptide
  pKL045
MRPTLLWSLLLLLGVFAAAAANLTTRTQLPPAYTNSFTRGVYYPDKVFRSSVLHSTQDLFLPFFSNVTWFHAIHVSGTNGTKRFDNPVLPFNDGVYFASTEKSNIIRGWIFGTTLDSKTQSLLIVNNATNVVIKVCEFQFCNDPFLGVYYHKNNKSWMESEFRVYSSANNCTFEYVSQPFLMDLEGKQGNFKNLREFVFKNIDGYFKIYSKHTPINLVRDLPQGFSALEPLVDLPIGINITRFQTLLALHRSYLTPGDSSSGWTAGAAAYYVGYLQPRTFLLKYNENGTITDAVDCALDPLSETKCTLKSFTVEKGIYQTSNFRVQPTESIVRFPNITNLCPFGEVFNATRFASVYAWNRKRISNCVADYSVLYNSASFSTFKCYGVSPTKLNDLCFTNVYADSFVIRGDEVRQIAPGQTGKIADYNYKLPDDFTGCVIAWNSNNLDSKVGGNYNYLYRLFRKSNLKPFERDISTEIYQAGSTPCNGVEGFNCYFPLQSYGFQPTNGVGYQPYRVVVLSFELLHAPATVCGPKKSTNLVKNKCVNFNFNGLTGTGVLTESNKKFLPFQQFGRDIADTTDAVRDPQTLEILDITPCSFGGVSVITPGTNTSNQVAVLYQDVNCTEVPVAIHADQLTPTWRVYSTGSNVFQTRAGCLIGAEHVNNSYECDIPIGAGICASYQTQTNSPGSASSVASQSIIAYTMSLGAENSVAYSNNSIAIPTNFTISVTTEILPVSMTKTSVDCTMYICGDSTECSNLLLQYGSFCTQLNRALTGIAVEQDKNTQEVFAQVKQIYKTPPIKDFGGFNFSQILPDPSKPSKRSFIEDLLFNKVTLADAGFIKQYGDCLGDIAARDLICAQKFNGLTVLPPLLTDEMIAQYTSALLAGTITSGWTFGAGAALQIPFAMQMAYRFNGIGVTQNVLYENQKLIANQFNSAIGKIQDSLSSTASALGKLQDVVNQNAQALNTLVKQLSSNFGAISSVLNDILSRLDPPEAEVQIDRLITGRLQSLQTYVTQQLIRAAEIRASANLAATKMSECVLGQSKRVDFCGKGYHLMSFPQSAPHGVVFLHVTYVPAQEKNFTTAPAICHDGKAHFPREGVFVSNGTHWFVTQRNFYEPQIITTDNTFVSGNCDVVIGIVNNTVYDPLQPELDSFKEELDKYFKNHTSPDVDLGDISGINASVVNIQKEIDRLNEVAKNLNESLIDLQELGKYEQYIKWPWYIWLGFIAGLIAIVMVTIMLCCMTSCCSCLKGCCSCGSCCKFDEDDSEPVLKGVKLHYT

SEQ ID NO: 71 - protein, 1276 aa, Artificial Sequence
  Description of Artificial Sequence: Synthetic polypeptide
  pKL046
MRPTLLWSLLLLLGVFAAAAATTRTQLPPAYTNSFTRGVYYPDKVFRSSVLHSTQDLFLPFFSNVTWFHAIHVSGTNGTKRFDNPVLPFNDGVYFASTEKSNIIRGWIFGTTLDSKTQSLLIVNNATNVVIKVCEFQFCNDPFLGVYYHKNNKSWMESEFRVYSSANNCTFEYVSQPFLMDLEGKQGNFKNLREFVFKNIDGYFKIYSKHTPINLVRDLPQGFSALEPLVDLPIGINITRFQTLLALHRSYLTPGDSSSGWTAGAAAYYVGYLQPRTFLLKYNENGTITDAVDCALDPLSETKCTLKSFTVEKGIYQTSNFRVQPTESIVRFPNITNLCPFGEVFNATRFASVYAWNRKRISNCVADYSVLYNSASFSTFKCYGVSPTKLNDLCFTNVYADSFVIRGDEVRQIAPGQTGKIADYNYKLPDDFTGCVIAWNSNNLDSKVGGNYNYLYRLFRKSNLKPFERDISTEIYQAGSTPCNGVEGFNCYFPLQSYGFQPTNGVGYQPYRVVVLSFELLHAPATVCGPKKSTNLVKNKCVNFNFNGLTGTGVLTESNKKFLPFQQFGRDIADTTDAVRDPQTLEILDITPCSFGGVSVITPGTNTSNQVAVLYQDVNCTEVPVAIHADQLTPTWRVYSTGSNVFQTRAGCLIGAEHVNNSYECDIPIGAGICASYQTQTNSPGSASSVASQSIIAYTMSLGAENSVAYSNNSIAIPTNFTISVTTEILPVSMTKTSVDCTMYICGDSTECSNLLLQYGSFCTQLNRALTGIAVEQDKNTQEVFAQVKQIYKTPPIKDFGGFNFSQILPDPSKPSKRSFIEDLLFNKVTLADAGFIKQYGDCLGDIAARDLICAQKFNGLTVLPPLLTDEMIAQYTSALLAGTITSGWTFGAGAALQIPFAMQMAYRFNGIGVTQNVLYENQKLIANQFNSAIGKIQDSLSSTASALGKLQDVVNQNAQALNTLVKQLSSNFGAISSVLNDILSRLDPPEAEVQIDRLITGRLQSLQTYVTQQLIRAAEIRASANLAATKMSECVLGQSKRVDFCGKGYHLMSFPQSAPHGVVFLHVTYVPAQEKNFTTAPAICHDGKAHFPREGVFVSNGTHWFVTQRNFYEPQIITTDNTFVSGNCDVVIGIVNNTVYDPLQPELDSFKEELDKYFKNHTSPDVDLGDISGINASVVNIQKEIDRLNEVAKNLNESLIDLQELGKYEQYIKWPWYIWLGFIAGLIAIVMVTIMLCCMTSCCSCLKGCCSCGSCCKFDEDDSEPVLKGVKLHYT

SEQ ID NO: 72 - protein, 1276 aa, Artificial Sequence
  Description of Artificial Sequence: Synthetic polypeptide
  pKL047
MGVKVLFALICIAVAEAKPNLTTRTQLPPAYTNSFTRGVYYPDKVFRSSVLHSTQDLFLPFFSNVTWFHAIHVSGTNGTKRFDNPVLPFNDGVYFASTEKSNIIRGWIFGTTLDSKTQSLLIVNNATNVVIKVCEFQFCNDPFLGVYYHKNNKSWMESEFRVYSSANNCTFEYVSQPFLMDLEGKQGNFKNLREFVFKNIDGYFKIYSKHTPINLVRDLPQGFSALEPLVDLPIGINITRFQTLLALHRSYLTPGDSSSGWTAGAAAYYVGYLQPRTFLLKYNENGTITDAVDCALDPLSETKCTLKSFTVEKGIYQTSNFRVQPTESIVRFPNITNLCPFGEVFNATRFASVYAWNRKRISNCVADYSVLYNSASFSTFKCYGVSPTKLNDLCFTNVYADSFVIRGDEVRQIAPGQTGKIADYNYKLPDDFTGCVIAWNSNNLDSKVGGNYNYLYRLFRKSNLKPFERDISTEIYQAGSTPCNGVEGFNCYFPLQSYGFQPTNGVGYQPYRVVVLSFELLHAPATVCGPKKSTNLVKNKCVNFNFNGLTGTGVLTESNKKFLPFQQFGRDIADTTDAVRDPQTLEILDITPCSFGGVSVITPGTNTSNQVAVLYQDVNCTEVPVAIHADQLTPTWRVYSTGSNVFQTRAGCLIGAEHVNNSYECDIPIGAGICASYQTQTNSPGSASSVASQSIIAYTMSLGAENSVAYSNNSIAIPTNFTISVTTEILPVSMTKTSVDCTMYICGDSTECSNLLLQYGSFCTQLNRALTGIAVEQDKNTQEVFAQVKQIYKTPPIKDFGGFNFSQILPDPSKPSKRSFIEDLLFNKVTLADAGFIKQYGDCLGDIAARDLICAQKFNGLTVLPPLLTDEMIAQYTSALLAGTITSGWTFGAGAALQIPFAMQMAYRFNGIGVTQNVLYENQKLIANQFNSAIGKIQDSLSSTASALGKLQDVVNQNAQALNTLVKQLSSNFGAISSVLNDILSRLDPPEAEVQIDRLITGRLQSLQTYVTQQLIRAAEIRASANLAATKMSECVLGQSKRVDFCGKGYHLMSFPQSAPHGVVFLHVTYVPAQEKNFTTAPAICHDGKAHFPREGVFVSNGTHWFVTQRNFYEPQIITTDNTFVSGNCDVVIGIVNNTVYDPLQPELDSFKEELDKYFKNHTSPDVDLGDISGINASVVNIQKEIDRLNEVAKNLNESLIDLQELGKYEQYIKWPWYIWLGFIAGLIAIVMVTIMLCCMTSCCSCLKGCCSCGSCCKFDEDDSEPVLKGVKLHYT

SEQ ID NO: 73 - protein, 1274 aa, Artificial Sequence
  Description of Artificial Sequence: Synthetic polypeptide
  pKL048
MGVKVLFALICIAVAEAKPTTRTQLPPAYTNSFTRGVYYPDKVFRSSVLHSTQDLFLPFFSNVTWFHAIHVSGTNGTKRFDNPVLPFNDGVYFASTEKSNIIRGWIFGTTLDSKTQSLLIVNNATNVVIKVCEFQFCNDPFLGVYYHKNNKSWMESEFRVYSSANNCTFEYVSQPFLMDLEGKQGNFKNLREFVFKNIDGYFKIYSKHTPINLVRDLPQGFSALEPLVDLPIGINITRFQTLLALHRSYLTPGDSSSGWTAGAAAYYVGYLQPRTFLLKYNENGTITDAVDCALDPLSETKCTLKSFTVEKGIYQTSNFRVQPTESIVRFPNITNLCPFGEVFNATRFASVYAWNRKRISNCVADYSVLYNSASFSTFKCYGVSPTKLNDLCFTNVYADSFVIRGDEVRQIAPGQTGKIADYNYKLPDDFTGCVIAWNSNNLDSKVGGNYNYLYRLFRKSNLKPFERDISTEIYQAGSTPCNGVEGFNCYFPLQSYGFQPTNGVGYQPYRVVVLSFELLHAPATVCGPKKSTNLVKNKCVNFNFNGLTGTGVLTESNKKFLPFQQFGRDIADTTDAVRDPQTLEILDITPCSFGGVSVITPGTNTSNQVAVLYQDVNCTEVPVAIHADQLTPTWRVYSTGSNVFQTRAGCLIGAEHVNNSYECDIPIGAGICASYQTQTNSPGSASSVASQSIIAYTMSLGAENSVAYSNNSIAIPTNFTISVTTEILPVSMTKTSVDCTMYICGDSTECSNLLLQYGSFCTQLNRALTGIAVEQDKNTQEVFAQVKQIYKTPPIKDFGGFNFSQILPDPSKPSKRSFIEDLLFNKVTLADAGFIKQYGDCLGDIAARDLICAQKFNGLTVLPPLLTDEMIAQYTSALLAGTITSGWTFGAGAALQIPFAMQMAYRFNGIGVTQNVLYENQKLIANQFNSAIGKIQDSLSSTASALGKLQDVVNQNAQALNTLVKQLSSNFGAISSVLNDILSRLDPPEAEVQIDRLITGRLQSLQTYVTQQLIRAAEIRASANLAATKMSECVLGQSKRVDFCGKGYHLMSFPQSAPHGVVFLHVTYVPAQEKNFTTAPAICHDGKAHFPREGVFVSNGTHWFVTQRNFYEPQIITTDNTFVSGNCDVVIGIVNNTVYDPLQPELDSFKEELDKYFKNHTSPDVDLGDISGINASVVNIQKEIDRLNEVAKNLNESLIDLQELGKYEQYIKWPWYIWLGFIAGLIAIVMVTIMLCCMTSCCSCLKGCCSCGSCCKFDEDDSEPVLKGVKLHYT

SEQ ID NO: 74 - DNA, 3717 bp, Artificial Sequence
  Description of Artificial Sequence: Synthetic polynucleotide
  pJW18
atgtttgtttttcttgttcttctgccattggtgtcttcccaatgtgtgaacttgactacccgcacacagctcccgccggcgtacactaactccttcacccggggggtttactacccggacaaagtgttccgcagcagtgtcctgcattcaacacaagatttgttccttccattctttagcaatgtcacttggttccatgctatacacgtgagtggcactaacggcactaagcgcttcgataacccggttctgccgtttaatgatggcgtttacttcgcaagtactgagaaatcaaacattatacgggggtggatattcggtactacattggatagtaaaactcaaagccttttgattgtcaacaatgcaactaatgtagtcataaaagtttgtgaattccaattctgtaacgatccctttcttggtgtgtattaccacaagaataacaaatcatggatggagtctgaatttcgagtatacagtagcgccaataattgcacgtttgagtatgtaagccagccgtttctgatggacttggaaggaaagcaaggcaactttaagaacctcagggagttcgtattcaaaaatatagacggttacttcaagatttactcaaaacatacacctatcaacttggtccgagatctcccacaaggtttttcagcgctcgagccattggtggacctgcccatcggaatcaacattacccgattccagacactgcttgcactgcaccggagttatctcacacccggcgacagctcgtctggttggacggcgggagctgccgcttactatgtcggttacttgcaacctcggacatttcttctgaagtataacgaaaacggtacgatcaccgatgccgtagactgcgctctcgatcccctttcagagacgaagtgcacgctcaaatcatttactgtggaaaaaggaatttatcaaacgagcaatttcagggtgcaacccacggagtccatcgtacgattcccaaacataacaaatctttgcccgtttggcgaggtttttaatgctacgcgctttgcatcagtgtacgcttggaataggaaacgaatctcaaattgtgttgcggattattccgtgttgtataattccgcaagcttctccacctttaaatgttatggcgtgtcccccacaaaacttaacgatctttgctttacaaatgtctatgcggattcattcgttatccgaggggatgaagtgcgacaaatcgctcctgggcagacagggaagatagctgattacaattacaaacttccagacgattttacaggatgtgtaatcgcgtggaactcaaacaatttggacagtaaggttggtggcaactacaattatctgtatagacttttcagaaaaagtaacctcaaacctttcgaacgcgacattagcactgagatataccaggccggatcaactccttgtaacggtgttgaaggtttcaactgttactttccgctccaatcctacggctttcaaccaacgaacggtgtcgggtaccaaccatacagagttgtcgtcttgagttttgagcttttgcacgcacctgcaaccgtgtgtggtccgaagaaaagtactaatctggttaaaaataaatgcgtcaatttcaactttaatgggttgacgggcacaggcgtgctgacagagtccaataaaaagtttttgccctttcagcagtttgggagggacatcgccgatacgaccgatgccgtccgagatcctcaaacccttgaaatattggacattaccccctgtagttttggcggtgtaagtgtgattactcccggaacgaatacatctaaccaggtagcggtgctttatcaagatgtcaactgtacagaggtccccgtggcgattcacgccgatcagttgacacccacatggagggtttacagcacaggatccaacgtcttccagacgagagcaggatgcttgatcggtgccgagcatgtgaataacagctacgaatgtgacattccgattggtgctggaatctgcgcaagttaccaaactcaaacgaattcccctggctccgcctcctctgtggcatcccagtctataatcgcgtatacgatgtcactgggcgccgagaattctgtcgcatatagcaacaactccatcgcaatacccacaaattttacaatttctgtgaccacggaaattctgcccgtcagcatgacaaaaactagcgtggactgcacgatgtatatctgcggcgactccacagagtgttccaacctcctcttgcaatatggcagcttttgcacacaattgaaccgagcgctcaccgggatagcggtcgagcaagataagaatacccaagaggtgtttgcccaggtgaagcaaatctataagacccctccaataaaggattttggcggcttcaatttctcacaaattttgcccgatccatctaagccgtccaagcgatcatttattgaggatctgctgttcaacaaagtcactctcgccgacgcggggtttattaaacaatatggcgattgcctgggcgacatcgccgccagggaccttatatgcgcccagaagttcaacggtctcaccgtgctgccaccattgttgactgacgaaatgatcgcacagtatacgtcagcgctgctggctggtaccattacttctggctggacattcggagccggtgcagcccttcagattccatttgcaatgcagatggcctatagatttaatggaataggagtgacgcagaacgtattgtacgagaatcaaaagttgatcgcaaaccagttcaattctgccattggaaagatacaagattccctttcttctaccgcctcagccctgggtaagttgcaagatgtcgtcaaccaaaatgcacaggctttgaataccttggtaaaacaattgtcatccaatttcggcgccataagctcagtacttaacgatatcttgtcacgattggatccccccgaagccgaggtccaaatcgataggctcatcacgggacggctccagagccttcaaacctatgtgacgcaacaactgatacgggccgcagaaatccgagcgtccgccaacttggcagctaccaagatgtccgaatgtgtactgggtcaatcaaagagagttgatttctgtggaaaaggataccatctcatgtcattcccccaaagcgccccgcacggcgtcgtgttcctccatgtgacttacgttccagcacaagaaaaaaacttcacaactgcgcccgctatctgccatgacgggaaggcgcacttcccacgagagggtgtatttgtgtcaaatggaacgcactggttcgtaacgcaaaggaacttctatgaaccgcagataatcacgactgacaacacttttgtatctggcaattgtgatgtggtcatcgggatagttaacaacactgtctatgacccgctgcaacccgagcttgattcatttaaagaagaactcgataaatatttcaagaatcacaccagtcccgatgtggaccttggagacatttccgggataaatgcctctgtggtaaacatccaaaaggaaatcgatcggctgaatgaagtggccaaaaacttgaacgaaagtctgatagaccttcaggagctcgggaagtatgaacaagggagcggttatattcctgaagctccaagagatgggcaagcttacgttcgtaaagatggcgaatgggtacttctttctacctttttatgatga

SEQ ID NO: 75 - DNA, 3723 bp, Artificial Sequence
  Description of Artificial Sequence: Synthetic polynucleotide
  pKL049
atgggtgttaaagtgcttttcgctcttatctgtatagctgtcgctgaggcaaagaacttgactacccgcacacagctcccgccggcgtacactaactccttcacccggggggtttactacccggacaaagtgttccgcagcagtgtcctgcattcaacacaagatttgttccttccattctttagcaatgtcacttggttccatgctatacacgtgagtggcactaacggcactaagcgcttcgataacccggttctgccgtttaatgatggcgtttacttcgcaagtactgagaaatcaaacattatacgggggtggatattcggtactacattggatagtaaaactcaaagccttttgattgtcaacaatgcaactaatgtagtcataaaagtttgtgaattccaattctgtaacgatccctttcttggtgtgtattaccacaagaataacaaatcatggatggagtctgaatttcgagtatacagtagcgccaataattgcacgtttgagtatgtaagccagccgtttctgatggacttggaaggaaagcaaggcaactttaagaacctcagggagttcgtattcaaaaatatagacggttacttcaagatttactcaaaacatacacctatcaacttggtccgagatctcccacaaggtttttcagcgctcgagccattggtggacctgcccatcggaatcaacattacccgattccagacactgcttgcactgcaccggagttatctcacacccggcgacagctcgtctggttggacggcgggagctgccgcttactatgtcggttacttgcaacctcggacatttcttctgaagtataacgaaaacggtacgatcaccgatgccgtagactgcgctctcgatcccctttcagagacgaagtgcacgctcaaatcatttactgtggaaaaaggaatttatcaaacgagcaatttcagggtgcaacccacggagtccatcgtacgattcccaaacataacaaatctttgcccgtttggcgaggtttttaatgctacgcgctttgcatcagtgtacgcttggaataggaaacgaatctcaaattgtgttgcggattattccgtgttgtataattccgcaagcttctccacctttaaatgttatggcgtgtcccccacaaaacttaacgatctttgctttacaaatgtctatgcggattcattcgttatccgaggggatgaagtgcgacaaatcgctcctgggcagacagggaagatagctgattacaattacaaacttccagacgattttacaggatgtgtaatcgcgtggaactcaaacaatttggacagtaaggttggtggcaactacaattatctgtatagacttttcagaaaaagtaacctcaaacctttcgaacgcgacattagcactgagatataccaggccggatcaactccttgtaacggtgttgaaggtttcaactgttactttccgctccaatcctacggctttcaaccaacgaacggtgtcgggtaccaaccatacagagttgtcgtcttgagttttgagcttttgcacgcacctgcaaccgtgtgtggtccgaagaaaagtactaatctggttaaaaataaatgcgtcaatttcaactttaatgggttgacgggcacaggcgtgctgacagagtccaataaaaagtttttgccctttcagcagtttgggagggacatcgccgatacgaccgatgccgtccgagatcctcaaacccttgaaatattggacattaccccctgtagttttggcggtgtaagtgtgattactcccggaacgaatacatctaaccaggtagcggtgctttatcaagatgtcaactgtacagaggtccccgtggcgattcacgccgatcagttgacacccacatggagggtttacagcacaggatccaacgtcttccagacgagagcaggatgcttgatcggtgccgagcatgtgaataacagctacgaatgtgacattccgattggtgctggaatctgcgcaagttaccaaactcaaacgaattcccctggctccgcctcctctgtggcatcccagtctataatcgcgtatacgatgtcactgggcgccgagaattctgtcgcatatagcaacaactccatcgcaatacccacaaattttacaatttctgtgaccacggaaattctgcccgtcagcatgacaaaaactagcgtggactgcacgatgtatatctgcggcgactccacagagtgttccaacctcctcttgcaatatggcagcttttgcacacaattgaaccgagcgctcaccgggatagcggtcgagcaagataagaatacccaagaggtgtttgcccaggtgaagcaaatctataagacccctccaataaaggattttggcggcttcaatttctcacaaattttgcccgatccatctaagccgtccaagcgatcatttattgaggatctgctgttcaacaaagtcactctcgccgacgcggggtttattaaacaatatggcgattgcctgggcgacatcgccgccagggaccttatatgcgcccagaagttcaacggtctcaccgtgctgccaccattgttgactgacgaaatgatcgcacagtatacgtcagcgctgctggctggtaccattacttctggctggacattcggagccggtgcagcccttcagattccatttgcaatgcagatggcctatagatttaatggaataggagtgacgcagaacgtattgtacgagaatcaaaagttgatcgcaaaccagttcaattctgccattggaaagatacaagattccctttcttctaccgcctcagccctgggtaagttgcaagatgtcgtcaaccaaaatgcacaggctttgaataccttggtaaaacaattgtcatccaatttcggcgccataagctcagtacttaacgatatcttgtcacgattggatccccccgaagccgaggtccaaatcgataggctcatcacgggacggctccagagccttcaaacctatgtgacgcaacaactgatacgggccgcagaaatccgagcgtccgccaacttggcagctaccaagatgtccgaatgtgtactgggtcaatcaaagagagttgatttctgtggaaaaggataccatctcatgtcattcccccaaagcgccccgcacggcgtcgtgttcctccatgtgacttacgttccagcacaagaaaaaaacttcacaactgcgcccgctatctgccatgacgggaaggcgcacttcccacgagagggtgtatttgtgtcaaatggaacgcactggttcgtaacgcaaaggaacttctatgaaccgcagataatcacgactgacaacacttttgtatctggcaattgtgatgtggtcatcgggatagttaacaacactgtctatgacccgctgcaacccgagcttgattcatttaaagaagaactcgataaatatttcaagaatcacaccagtcccgatgtggaccttggagacatttccgggataaatgcctctgtggtaaacatccaaaaggaaatcgatcggctgaatgaagtggccaaaaacttgaacgaaagtctgatagaccttcaggagctcgggaagtatgaacaagggagcggttatattcctgaagctccaagagatgggcaagcttacgttcgtaaagatggcgaatgggtacttctttctacctttttatgatga

SEQ ID NO: 76 - DNA, 3717 bp, Artificial Sequence
  Description of Artificial Sequence: Synthetic polynucleotide
  pKL050
atgggtgttaaagtgcttttcgctcttatctgtatagctgtcgctgaggcaaagactacccgcacacagctcccgccggcgtacactaactccttcacccggggggtttactacccggacaaagtgttccgcagcagtgtcctgcattcaacacaagatttgttccttccattctttagcaatgtcacttggttccatgctatacacgtgagtggcactaacggcactaagcgcttcgataacccggttctgccgtttaatgatggcgtttacttcgcaagtactgagaaatcaaacattatacgggggtggatattcggtactacattggatagtaaaactcaaagccttttgattgtcaacaatgcaactaatgtagtcataaaagtttgtgaattccaattctgtaacgatccctttcttggtgtgtattaccacaagaataacaaatcatggatggagtctgaatttcgagtatacagtagcgccaataattgcacgtttgagtatgtaagccagccgtttctgatggacttggaaggaaagcaaggcaactttaagaacctcagggagttcgtattcaaaaatatagacggttacttcaagatttactcaaaacatacacctatcaacttggtccgagatctcccacaaggtttttcagcgctcgagccattggtggacctgcccatcggaatcaacattacccgattccagacactgcttgcactgcaccggagttatctcacacccggcgacagctcgtctggttggacggcgggagctgccgcttactatgtcggttacttgcaacctcggacatttcttctgaagtataacgaaaacggtacgatcaccgatgccgtagactgcgctctcgatcccctttcagagacgaagtgcacgctcaaatcatttactgtggaaaaaggaatttatcaaacgagcaatttcagggtgcaacccacggagtccatcgtacgattcccaaacataacaaatctttgcccgtttggcgaggtttttaatgctacgcgctttgcatcagtgtacgcttggaataggaaacgaatctcaaattgtgttgcggattattccgtgttgtataattccgcaagcttctccacctttaaatgttatggcgtgtcccccacaaaacttaacgatctttgctttacaaatgtctatgcggattcattcgttatccgaggggatgaagtgcgacaaatcgctcctgggcagacagggaagatagctgattacaattacaaacttccagacgattttacaggatgtgtaatcgcgtggaactcaaacaatttggacagtaaggttggtggcaactacaattatctgtatagacttttcagaaaaagtaacctcaaacctttcgaacgcgacattagcactgagatataccaggccggatcaactccttgtaacggtgttgaaggtttcaactgttactttccgctccaatcctacggctttcaaccaacgaacggtgtcgggtaccaaccatacagagttgtcgtcttgagttttgagcttttgcacgcacctgcaaccgtgtgtggtccgaagaaaagtactaatctggttaaaaataaatgcgtcaatttcaactttaatgggttgacgggcacaggcgtgctgacagagtccaataaaaagtttttgccctttcagcagtttgggagggacatcgccgatacgaccgatgccgtccgagatcctcaaacccttgaaatattggacattaccccctgtagttttggcggtgtaagtgtgattactcccggaacgaatacatctaaccaggtagcggtgctttatcaagatgtcaactgtacagaggtccccgtggcgattcacgccgatcagttgacacccacatggagggtttacagcacaggatccaacgtcttccagacgagagcaggatgcttgatcggtgccgagcatgtgaataacagctacgaatgtgacattccgattggtgctggaatctgcgcaagttaccaaactcaaacgaattcccctggctccgcctcctctgtggcatcccagtctataatcgcgtatacgatgtcactgggcgccgagaattctgtcgcatatagcaacaactccatcgcaatacccacaaattttacaatttctgtgaccacggaaattctgcccgtcagcatgacaaaaactagcgtggactgcacgatgtatatctgcggcgactccacagagtgttccaacctcctcttgcaatatggcagcttttgcacacaattgaaccgagcgctcaccgggatagcggtcgagcaagataagaatacccaagaggtgtttgcccaggtgaagcaaatctataagacccctccaataaaggattttggcggcttcaatttctcacaaattttgcccgatccatctaagccgtccaagcgatcatttattgaggatctgctgttcaacaaagtcactctcgccgacgcggggtttattaaacaatatggcgattgcctgggcgacatcgccgccagggaccttatatgcgcccagaagttcaacggtctcaccgtgctgccaccattgttgactgacgaaatgatcgcacagtatacgtcagcgctgctggctggtaccattacttctggctggacattcggagccggtgcagcccttcagattccatttgcaatgcagatggcctatagatttaatggaataggagtgacgcagaacgtattgtacgagaatcaaaagttgatcgcaaaccagttcaattctgccattggaaagatacaagattccctttcttctaccgcctcagccctgggtaagttgcaagatgtcgtcaaccaaaatgcacaggctttgaataccttggtaaaacaattgtcatccaatttcggcgccataagctcagtacttaacgatatcttgtcacgattggatccccccgaagccgaggtccaaatcgataggctcatcacgggacggctccagagccttcaaacctatgtgacgcaacaactgatacgggccgcagaaatccgagcgtccgccaacttggcagctaccaagatgtccgaatgtgtactgggtcaatcaaagagagttgatttctgtggaaaaggataccatctcatgtcattcccccaaagcgccccgcacggcgtcgtgttcctccatgtgacttacgttccagcacaagaaaaaaacttcacaactgcgcccgctatctgccatgacgggaaggcgcacttcccacgagagggtgtatttgtgtcaaatggaacgcactggttcgtaacgcaaaggaacttctatgaaccgcagataatcacgactgacaacacttttgtatctggcaattgtgatgtggtcatcgggatagttaacaacactgtctatgacccgctgcaacccgagcttgattcatttaaagaagaactcgataaatatttcaagaatcacaccagtcccgatgtggaccttggagacatttccgggataaatgcctctgtggtaaacatccaaaaggaaatcgatcggctgaatgaagtggccaaaaacttgaacgaaagtctgatagaccttcaggagctcgggaagtatgaacaagggagcggttatattcctgaagctccaagagatgggcaagcttacgttcgtaaagatggcgaatgggtacttctttctacctttttatgatga

SEQ ID NO: 77 - DNA, 3741 bp, Artificial Sequence
  Description of Artificial Sequence: Synthetic polynucleotide
  pKL051
atgcctatgggctctctgcaaccccttgcaaccctttatttgttggggatgcttgtcgcgtccgtcctcgcgaacttgactacccgcacacagctcccgccggcgtacactaactccttcacccggggggtttactacccggacaaagtgttccgcagcagtgtcctgcattcaacacaagatttgttccttccattctttagcaatgtcacttggttccatgctatacacgtgagtggcactaacggcactaagcgcttcgataacccggttctgccgtttaatgatggcgtttacttcgcaagtactgagaaatcaaacattatacgggggtggatattcggtactacattggatagtaaaactcaaagccttttgattgtcaacaatgcaactaatgtagtcataaaagtttgtgaattccaattctgtaacgatccctttcttggtgtgtattaccacaagaataacaaatcatggatggagtctgaatttcgagtatacagtagcgccaataattgcacgtttgagtatgtaagccagccgtttctgatggacttggaaggaaagcaaggcaactttaagaacctcagggagttcgtattcaaaaatatagacggttacttcaagatttactcaaaacatacacctatcaacttggtccgagatctcccacaaggtttttcagcgctcgagccattggtggacctgcccatcggaatcaacattacccgattccagacactgcttgcactgcaccggagttatctcacacccggcgacagctcgtctggttggacggcgggagctgccgcttactatgtcggttacttgcaacctcggacatttcttctgaagtataacgaaaacggtacgatcaccgatgccgtagactgcgctctcgatcccctttcagagacgaagtgcacgctcaaatcatttactgtggaaaaaggaatttatcaaacgagcaatttcagggtgcaacccacggagtccatcgtacgattcccaaacataacaaatctttgcccgtttggcgaggtttttaatgctacgcgctttgcatcagtgtacgcttggaataggaaacgaatctcaaattgtgttgcggattattccgtgttgtataattccgcaagcttctccacctttaaatgttatggcgtgtcccccacaaaacttaacgatctttgctttacaaatgtctatgcggattcattcgttatccgaggggatgaagtgcgacaaatcgctcctgggcagacagggaagatagctgattacaattacaaacttccagacgattttacaggatgtgtaatcgcgtggaactcaaacaatttggacagtaaggttggtggcaactacaattatctgtatagacttttcagaaaaagtaacctcaaacctttcgaacgcgacattagcactgagatataccaggccggatcaactccttgtaacggtgttgaaggtttcaactgttactttccgctccaatcctacggctttcaaccaacgaacggtgtcgggtaccaaccatacagagttgtcgtcttgagttttgagcttttgcacgcacctgcaaccgtgtgtggtccgaagaaaagtactaatctggttaaaaataaatgcgtcaatttcaactttaatgggttgacgggcacaggcgtgctgacagagtccaataaaaagtttttgccctttcagcagtttgggagggacatcgccgatacgaccgatgccgtccgagatcctcaaacccttgaaatattggacattaccccctgtagttttggcggtgtaagtgtgattactcccggaacgaatacatctaaccaggtagcggtgctttatcaagatgtcaactgtacagaggtccccgtggcgattcacgccgatcagttgacacccacatggagggtttacagcacaggatccaacgtcttccagacgagagcaggatgcttgatcggtgccgagcatgtgaataacagctacgaatgtgacattccgattggtgctggaatctgcgcaagttaccaaactcaaacgaattcccctggctccgcctcctctgtggcatcccagtctataatcgcgtatacgatgtcactgggcgccgagaattctgtcgcatatagcaacaactccatcgcaatacccacaaattttacaatttctgtgaccacggaaattctgcccgtcagcatgacaaaaactagcgtggactgcacgatgtatatctgcggcgactccacagagtgttccaacctcctcttgcaatatggcagcttttgcacacaattgaaccgagcgctcaccgggatagcggtcgagcaagataagaatacccaagaggtgtttgcccaggtgaagcaaatctataagacccctccaataaaggattttggcggcttcaatttctcacaaattttgcccgatccatctaagccgtccaagcgatcatttattgaggatctgctgttcaacaaagtcactctcgccgacgcggggtttattaaacaatatggcgattgcctgggcgacatcgccgccagggaccttatatgcgcccagaagttcaacggtctcaccgtgctgccaccattgttgactgacgaaatgatcgcacagtatacgtcagcgctgctggctggtaccattacttctggctggacattcggagccggtgcagcccttcagattccatttgcaatgcagatggcctatagatttaatggaataggagtgacgcagaacgtattgtacgagaatcaaaagttgatcgcaaaccagttcaattctgccattggaaagatacaagattccctttcttctaccgcctcagccctgggtaagttgcaagatgtcgtcaaccaaaatgcacaggctttgaataccttggtaaaacaattgtcatccaatttcggcgccataagctcagtacttaacgatatcttgtcacgattggatccccccgaagccgaggtccaaatcgataggctcatcacgggacggctccagagccttcaaacctatgtgacgcaacaactgatacgggccgcagaaatccgagcgtccgccaacttggcagctaccaagatgtccgaatgtgtactgggtcaatcaaagagagttgatttctgtggaaaaggataccatctcatgtcattcccccaaagcgccccgcacggcgtcgtgttcctccatgtgacttacgttccagcacaagaaaaaaacttcacaactgcgcccgctatctgccatgacgggaaggcgcacttcccacgagagggtgtatttgtgtcaaatggaacgcactggttcgtaacgcaaaggaacttctatgaaccgcagataatcacgactgacaacacttttgtatctggcaattgtgatgtggtcatcgggatagttaacaacactgtctatgacccgctgcaacccgagcttgattcatttaaagaagaactcgataaatatttcaagaatcacaccagtcccgatgtggaccttggagacatttccgggataaatgcctctgtggtaaacatccaaaaggaaatcgatcggctgaatgaagtggccaaaaacttgaacgaaagtctgatagaccttcaggagctcgggaagtatgaacaagggagcggttatattcctgaagctccaagagatgggcaagcttacgttcgtaaagatggcgaatgggtacttctttctacctttttatgatga

SEQ ID NO: 78 - DNA, 3735 bp, Artificial Sequence
  Description of Artificial Sequence: Synthetic polynucleotide
  pKL052
atgcctatgggctctctgcaaccccttgcaaccctttatttgttggggatgcttgtcgcgtccgtcctcgcgactacccgcacacagctcccgccggcgtacactaactccttcacccggggggtttactacccggacaaagtgttccgcagcagtgtcctgcattcaacacaagatttgttccttccattctttagcaatgtcacttggttccatgctatacacgtgagtggcactaacggcactaagcgcttcgataacccggttctgccgtttaatgatggcgtttacttcgcaagtactgagaaatcaaacattatacgggggtggatattcggtactacattggatagtaaaactcaaagccttttgattgtcaacaatgcaactaatgtagtcataaaagtttgtgaattccaattctgtaacgatccctttcttggtgtgtattaccacaagaataacaaatcatggatggagtctgaatttcgagtatacagtagcgccaataattgcacgtttgagtatgtaagccagccgtttctgatggacttggaaggaaagcaaggcaactttaagaacctcagggagttcgtattcaaaaatatagacggttacttcaagatttactcaaaacatacacctatcaacttggtccgagatctcccacaaggtttttcagcgctcgagccattggtggacctgcccatcggaatcaacattacccgattccagacactgcttgcactgcaccggagttatctcacacccggcgacagctcgtctggttggacggcgggagctgccgcttactatgtcggttacttgcaacctcggacatttcttctgaagtataacgaaaacggtacgatcaccgatgccgtagactgcgctctcgatcccctttcagagacgaagtgcacgctcaaatcatttactgtggaaaaaggaatttatcaaacgagcaatttcagggtgcaacccacggagtccatcgtacgattcccaaacataacaaatctttgcccgtttggcgaggtttttaatgctacgcgctttgcatcagtgtacgcttggaataggaaacgaatctcaaattgtgttgcggattattccgtgttgtataattccgcaagcttctccacctttaaatgttatggcgtgtcccccacaaaacttaacgatctttgctttacaaatgtctatgcggattcattcgttatccgaggggatgaagtgcgacaaatcgctcctgggcagacagggaagatagctgattacaattacaaacttccagacgattttacaggatgtgtaatcgcgtggaactcaaacaatttggacagtaaggttggtggcaactacaattatctgtatagacttttcagaaaaagtaacctcaaacctttcgaacgcgacattagcactgagatataccaggccggatcaactccttgtaacggtgttgaaggtttcaactgttactttccgctccaatcctacggctttcaaccaacgaacggtgtcgggtaccaaccatacagagttgtcgtcttgagttttgagcttttgcacgcacctgcaaccgtgtgtggtccgaagaaaagtactaatctggttaaaaataaatgcgtcaatttcaactttaatgggttgacgggcacaggcgtgctgacagagtccaataaaaagtttttgccctttcagcagtttgggagggacatcgccgatacgaccgatgccgtccgagatcctcaaacccttgaaatattggacattaccccctgtagttttggcggtgtaagtgtgattactcccggaacgaatacatctaaccaggtagcggtgctttatcaagatgtcaactgtacagaggtccccgtggcgattcacgccgatcagttgacacccacatggagggtttacagcacaggatccaacgtcttccagacgagagcaggatgcttgatcggtgccgagcatgtgaataacagctacgaatgtgacattccgattggtgctggaatctgcgcaagttaccaaactcaaacgaattcccctggctccgcctcctctgtggcatcccagtctataatcgcgtatacgatgtcactgggcgccgagaattctgtcgcatatagcaacaactccatcgcaatacccacaaattttacaatttctgtgaccacggaaattctgcccgtcagcatgacaaaaactagcgtggactgcacgatgtatatctgcggcgactccacagagtgttccaacctcctcttgcaatatggcagcttttgcacacaattgaaccgagcgctcaccgggatagcggtcgagcaagataagaatacccaagaggtgtttgcccaggtgaagcaaatctataagacccctccaataaaggattttggcggcttcaatttctcacaaattttgcccgatccatctaagccgtccaagcgatcatttattgaggatctgctgttcaacaaagtcactctcgccgacgcggggtttattaaacaatatggcgattgcctgggcgacatcgccgccagggaccttatatgcgcccagaagttcaacggtctcaccgtgctgccaccattgttgactgacgaaatgatcgcacagtatacgtcagcgctgctggctggtaccattacttctggctggacattcggagccggtgcagcccttcagattccatttgcaatgcagatggcctatagatttaatggaataggagtgacgcagaacgtattgtacgagaatcaaaagttgatcgcaaaccagttcaattctgccattggaaagatacaagattccctttcttctaccgcctcagccctgggtaagttgcaagatgtcgtcaaccaaaatgcacaggctttgaataccttggtaaaacaattgtcatccaatttcggcgccataagctcagtacttaacgatatcttgtcacgattggatccccccgaagccgaggtccaaatcgataggctcatcacgggacggctccagagccttcaaacctatgtgacgcaacaactgatacgggccgcagaaatccgagcgtccgccaacttggcagctaccaagatgtccgaatgtgtactgggtcaatcaaagagagttgatttctgtggaaaaggataccatctcatgtcattcccccaaagcgccccgcacggcgtcgtgttcctccatgtgacttacgttccagcacaagaaaaaaacttcacaactgcgcccgctatctgccatgacgggaaggcgcacttcccacgagagggtgtatttgtgtcaaatggaacgcactggttcgtaacgcaaaggaacttctatgaaccgcagataatcacgactgacaacacttttgtatctggcaattgtgatgtggtcatcgggatagttaacaacactgtctatgacccgctgcaacccgagcttgattcatttaaagaagaactcgataaatatttcaagaatcacaccagtcccgatgtggaccttggagacatttccgggataaatgcctctgtggtaaacatccaaaaggaaatcgatcggctgaatgaagtggccaaaaacttgaacgaaagtctgatagaccttcaggagctcgggaagtatgaacaagggagcggttatattcctgaagctccaagagatgggcaagcttacgttcgtaaagatggcgaatgggtacttctttctacctttttatgatga

SEQ ID NO: 79 - DNA, 3717 bp, Artificial Sequence
  Description of Artificial Sequence: Synthetic polynucleotide
  pKL053
atgcccctcttgcttctcttgccactgctgtgggctggggcggcagctaacttgactacccgcacacagctcccgccggcgtacactaactccttcacccggggggtttactacccggacaaagtgttccgcagcagtgtcctgcattcaacacaagatttgttccttccattctttagcaatgtcacttggttccatgctatacacgtgagtggcactaacggcactaagcgcttcgataacccggttctgccgtttaatgatggcgtttacttcgcaagtactgagaaatcaaacattatacgggggtggatattcggtactacattggatagtaaaactcaaagccttttgattgtcaacaatgcaactaatgtagtcataaaagtttgtgaattccaattctgtaacgatccctttcttggtgtgtattaccacaagaataacaaatcatggatggagtctgaatttcgagtatacagtagcgccaataattgcacgtttgagtatgtaagccagccgtttctgatggacttggaaggaaagcaaggcaactttaagaacctcagggagttcgtattcaaaaatatagacggttacttcaagatttactcaaaacatacacctatcaacttggtccgagatctcccacaaggtttttcagcgctcgagccattggtggacctgcccatcggaatcaacattacccgattccagacactgcttgcactgcaccggagttatctcacacccggcgacagctcgtctggttggacggcgggagctgccgcttactatgtcggttacttgcaacctcggacatttcttctgaagtataacgaaaacggtacgatcaccgatgccgtagactgcgctctcgatcccctttcagagacgaagtgcacgctcaaatcatttactgtggaaaaaggaatttatcaaacgagcaatttcagggtgcaacccacggagtccatcgtacgattcccaaacataacaaatctttgcccgtttggcgaggtttttaatgctacgcgctttgcatcagtgtacgcttggaataggaaacgaatctcaaattgtgttgcggattattccgtgttgtataattccgcaagcttctccacctttaaatgttatggcgtgtcccccacaaaacttaacgatctttgctttacaaatgtctatgcggattcattcgttatccgaggggatgaagtgcgacaaatcgctcctgggcagacagggaagatagctgattacaattacaaacttccagacgattttacaggatgtgtaatcgcgtggaactcaaacaatttggacagtaaggttggtggcaactacaattatctgtatagacttttcagaaaaagtaacctcaaacctttcgaacgcgacattagcactgagatataccaggccggatcaactccttgtaacggtgttgaaggtttcaactgttactttccgctccaatcctacggctttcaaccaacgaacggtgtcgggtaccaaccatacagagttgtcgtcttgagttttgagcttttgcacgcacctgcaaccgtgtgtggtccgaagaaaagtactaatctggttaaaaataaatgcgtcaatttcaactttaatgggttgacgggcacaggcgtgctgacagagtccaataaaaagtttttgccctttcagcagtttgggagggacatcgccgatacgaccgatgccgtccgagatcctcaaacccttgaaatattggacattaccccctgtagttttggcggtgtaagtgtgattactcccggaacgaatacatctaaccaggtagcggtgctttatcaagatgtcaactgtacagaggtccccgtggcgattcacgccgatcagttgacacccacatggagggtttacagcacaggatccaacgtcttccagacgagagcaggatgcttgatcggtgccgagcatgtgaataacagctacgaatgtgacattccgattggtgctggaatctgcgcaagttaccaaactcaaacgaattcccctggctccgcctcctctgtggcatcccagtctataatcgcgtatacgatgtcactgggcgccgagaattctgtcgcatatagcaacaactccatcgcaatacccacaaattttacaatttctgtgaccacggaaattctgcccgtcagcatgacaaaaactagcgtggactgcacgatgtatatctgcggcgactccacagagtgttccaacctcctcttgcaatatggcagcttttgcacacaattgaaccgagcgctcaccgggatagcggtcgagcaagataagaatacccaagaggtgtttgcccaggtgaagcaaatctataagacccctccaataaaggattttggcggcttcaatttctcacaaattttgcccgatccatctaagccgtccaagcgatcatttattgaggatctgctgttcaacaaagtcactctcgccgacgcggggtttattaaacaatatggcgattgcctgggcgacatcgccgccagggaccttatatgcgcccagaagttcaacggtctcaccgtgctgccaccattgttgactgacgaaatgatcgcacagtatacgtcagcgctgctggctggtaccattacttctggctggacattcggagccggtgcagcccttcagattccatttgcaatgcagatggcctatagatttaatggaataggagtgacgcagaacgtattgtacgagaatcaaaagttgatcgcaaaccagttcaattctgccattggaaagatacaagattccctttcttctaccgcctcagccctgggtaagttgcaagatgtcgtcaaccaaaatgcacaggctttgaataccttggtaaaacaattgtcatccaatttcggcgccataagctcagtacttaacgatatcttgtcacgattggatccccccgaagccgaggtccaaatcgataggctcatcacgggacggctccagagccttcaaacctatgtgacgcaacaactgatacgggccgcagaaatccgagcgtccgccaacttggcagctaccaagatgtccgaatgtgtactgggtcaatcaaagagagttgatttctgtggaaaaggataccatctcatgtcattcccccaaagcgccccgcacggcgtcgtgttcctccatgtgacttacgttccagcacaagaaaaaaacttcacaactgcgcccgctatctgccatgacgggaaggcgcacttcccacgagagggtgtatttgtgtcaaatggaacgcactggttcgtaacgcaaaggaacttctatgaaccgcagataatcacgactgacaacacttttgtatctggcaattgtgatgtggtcatcgggatagttaacaacactgtctatgacccgctgcaacccgagcttgattcatttaaagaagaactcgataaatatttcaagaatcacaccagtcccgatgtggaccttggagacatttccgggataaatgcctctgtggtaaacatccaaaaggaaatcgatcggctgaatgaagtggccaaaaacttgaacgaaagtctgatagaccttcaggagctcgggaagtatgaacaagggagcggttatattcctgaagctccaagagatgggcaagcttacgttcgtaaagatggcgaatgggtacttctttctacctttttatgatga

SEQ ID NO: 80 - DNA, 3711 bp, Artificial Sequence
  Description of Artificial Sequence: Synthetic polynucleotide
  pKL054
atgcccctcttgcttctcttgccactgctgtgggctggggcggcagctactacccgcacacagctcccgccggcgtacactaactccttcacccggggggtttactacccggacaaagtgttccgcagcagtgtcctgcattcaacacaagatttgttccttccattctttagcaatgtcacttggttccatgctatacacgtgagtggcactaacggcactaagcgcttcgataacccggttctgccgtttaatgatggcgtttacttcgcaagtactgagaaatcaaacattatacgggggtggatattcggtactacattggatagtaaaactcaaagccttttgattgtcaacaatgcaactaatgtagtcataaaagtttgtgaattccaattctgtaacgatccctttcttggtgtgtattaccacaagaataacaaatcatggatggagtctgaatttcgagtatacagtagcgccaataattgcacgtttgagtatgtaagccagccgtttctgatggacttggaaggaaagcaaggcaactttaagaacctcagggagttcgtattcaaaaatatagacggttacttcaagatttactcaaaacatacacctatcaacttggtccgagatctcccacaaggtttttcagcgctcgagccattggtggacctgcccatcggaatcaacattacccgattccagacactgcttgcactgcaccggagttatctcacacccggcgacagctcgtctggttggacggcgggagctgccgcttactatgtcggttacttgcaacctcggacatttcttctgaagtataacgaaaacggtacgatcaccgatgccgtagactgcgctctcgatcccctttcagagacgaagtgcacgctcaaatcatttactgtggaaaaaggaatttatcaaacgagcaatttcagggtgcaacccacggagtccatcgtacgattcccaaacataacaaatctttgcccgtttggcgaggtttttaatgctacgcgctttgcatcagtgtacgcttggaataggaaacgaatctcaaattgtgttgcggattattccgtgttgtataattccgcaagcttctccacctttaaatgttatggcgtgtcccccacaaaacttaacgatctttgctttacaaatgtctatgcggattcattcgttatccgaggggatgaagtgcgacaaatcgctcctgggcagacagggaagatagctgattacaattacaaacttccagacgattttacaggatgtgtaatcgcgtggaactcaaacaatttggacagtaaggttggtggcaactacaattatctgtatagacttttcagaaaaagtaacctcaaacctttcgaacgcgacattagcactgagatataccaggccggatcaactccttgtaacggtgttgaaggtttcaactgttactttccgctccaatcctacggctttcaaccaacgaacggtgtcgggtaccaaccatacagagttgtcgtcttgagttttgagcttttgcacgcacctgcaaccgtgtgtggtccgaagaaaagtactaatctggttaaaaataaatgcgtcaatttcaactttaatgggttgacgggcacaggcgtgctgacagagtccaataaaaagtttttgccctttcagcagtttgggagggacatcgccgatacgaccgatgccgtccgagatcctcaaacccttgaaatattggacattaccccctgtagttttggcggtgtaagtgtgattactcccggaacgaatacatctaaccaggtagcggtgctttatcaagatgtcaactgtacagaggtccccgtggcgattcacgccgatcagttgacacccacatggagggtttacagcacaggatccaacgtcttccagacgagagcaggatgcttgatcggtgccgagcatgtgaataacagctacgaatgtgacattccgattggtgctggaatctgcgcaagttaccaaactcaaacgaattcccctggctccgcctcctctgtggcatcccagtctataatcgcgtatacgatgtcactgggcgccgagaattctgtcgcatatagcaacaactccatcgcaatacccacaaattttacaatttctgtgaccacggaaattctgcccgtcagcatgacaaaaactagcgtggactgcacgatgtatatctgcggcgactccacagagtgttccaacctcctcttgcaatatggcagcttttgcacacaattgaaccgagcgctcaccgggatagcggtcgagcaagataagaatacccaagaggtgtttgcccaggtgaagcaaatctataagacccctccaataaaggattttggcggcttcaatttctcacaaattttgcccgatccatctaagccgtccaagcgatcatttattgaggatctgctgttcaacaaagtcactctcgccgacgcggggtttattaaacaatatggcgattgcctgggcgacatcgccgccagggaccttatatgcgcccagaagttcaacggtctcaccgtgctgccaccattgttgactgacgaaatgatcgcacagtatacgtcagcgctgctggctggtaccattacttctggctggacattcggagccggtgcagcccttcagattccatttgcaatgcagatggcctatagatttaatggaataggagtgacgcagaacgtattgtacgagaatcaaaagttgatcgcaaaccagttcaattctgccattggaaagatacaagattccctttcttctaccgcctcagccctgggtaagttgcaagatgtcgtcaaccaaaatgcacaggctttgaataccttggtaaaacaattgtcatccaatttcggcgccataagctcagtacttaacgatatcttgtcacgattggatccccccgaagccgaggtccaaatcgataggctcatcacgggacggctccagagccttcaaacctatgtgacgcaacaactgatacgggccgcagaaatccgagcgtccgccaacttggcagctaccaagatgtccgaatgtgtactgggtcaatcaaagagagttgatttctgtggaaaaggataccatctcatgtcattcccccaaagcgccccgcacggcgtcgtgttcctccatgtgacttacgttccagcacaagaaaaaaacttcacaactgcgcccgctatctgccatgacgggaaggcgcacttcccacgagagggtgtatttgtgtcaaatggaacgcactggttcgtaacgcaaaggaacttctatgaaccgcagataatcacgactgacaacacttttgtatctggcaattgtgatgtggtcatcgggatagttaacaacactgtctatgacccgctgcaacccgagcttgattcatttaaagaagaactcgataaatatttcaagaatcacaccagtcccgatgtggaccttggagacatttccgggataaatgcctctgtggtaaacatccaaaaggaaatcgatcggctgaatgaagtggccaaaaacttgaacgaaagtctgatagaccttcaggagctcgggaagtatgaacaagggagcggttatattcctgaagctccaagagatgggcaagcttacgttcgtaaagatggcgaatgggtacttctttctacctttttatgatga

SEQ ID NO: 81 - DNA, 3729 bp, Artificial Sequence
  Description of Artificial Sequence: Synthetic polynucleotide
  pKL055
atgtaccgaatgcagctcttgtcctgcattgctctcagccttgcacttgtgaccaattccaacttgactacccgcacacagctcccgccggcgtacactaactccttcacccggggggtttactacccggacaaagtgttccgcagcagtgtcctgcattcaacacaagatttgttccttccattctttagcaatgtcacttggttccatgctatacacgtgagtggcactaacggcactaagcgcttcgataacccggttctgccgtttaatgatggcgtttacttcgcaagtactgagaaatcaaacattatacgggggtggatattcggtactacattggatagtaaaactcaaagccttttgattgtcaacaatgcaactaatgtagtcataaaagtttgtgaattccaattctgtaacgatccctttcttggtgtgtattaccacaagaataacaaatcatggatggagtctgaatttcgagtatacagtagcgccaataattgcacgtttgagtatgtaagccagccgtttctgatggacttggaaggaaagcaaggcaactttaagaacctcagggagttcgtattcaaaaatatagacggttacttcaagatttactcaaaacatacacctatcaacttggtccgagatctcccacaaggtttttcagcgctcgagccattggtggacctgcccatcggaatcaacattacccgattccagacactgcttgcactgcaccggagttatctcacacccggcgacagctcgtctggttggacggcgggagctgccgcttactatgtcggttacttgcaacctcggacatttcttctgaagtataacgaaaacggtacgatcaccgatgccgtagactgcgctctcgatcccctttcagagacgaagtgcacgctcaaatcatttactgtggaaaaaggaatttatcaaacgagcaatttcagggtgcaacccacggagtccatcgtacgattcccaaacataacaaatctttgcccgtttggcgaggtttttaatgctacgcgctttgcatcagtgtacgcttggaataggaaacgaatctcaaattgtgttgcggattattccgtgttgtataattccgcaagcttctccacctttaaatgttatggcgtgtcccccacaaaacttaacgatctttgctttacaaatgtctatgcggattcattcgttatccgaggggatgaagtgcgacaaatcgctcctgggcagacagggaagatagctgattacaattacaaacttccagacgattttacaggatgtgtaatcgcgtggaactcaaacaatttggacagtaaggttggtggcaactacaattatctgtatagacttttcagaaaaagtaacctcaaacctttcgaacgcgacattagcactgagatataccaggccggatcaactccttgtaacggtgttgaaggtttcaactgttactttccgctccaatcctacggctttcaaccaacgaacggtgtcgggtaccaaccatacagagttgtcgtcttgagttttgagcttttgcacgcacctgcaaccgtgtgtggtccgaagaaaagtactaatctggttaaaaataaatgcgtcaatttcaactttaatgggttgacgggcacaggcgtgctgacagagtccaataaaaagtttttgccctttcagcagtttgggagggacatcgccgatacgaccgatgccgtccgagatcctcaaacccttgaaatattggacattaccccctgtagttttggcggtgtaagtgtgattactcccggaacgaatacatctaaccaggtagcggtgctttatcaagatgtcaactgtacagaggtccccgtggcgattcacgccgatcagttgacacccacatggagggtttacagcacaggatccaacgtcttccagacgagagcaggatgcttgatcggtgccgagcatgtgaataacagctacgaatgtgacattccgattggtgctggaatctgcgcaagttaccaaactcaaacgaattcccctggctccgcctcctctgtggcatcccagtctataatcgcgtatacgatgtcactgggcgccgagaattctgtcgcatatagcaacaactccatcgcaatacccacaaattttacaatttctgtgaccacggaaattctgcccgtcagcatgacaaaaactagcgtggactgcacgatgtatatctgcggcgactccacagagtgttccaacctcctcttgcaatatggcagcttttgcacacaattgaaccgagcgctcaccgggatagcggtcgagcaagataagaatacccaagaggtgtttgcccaggtgaagcaaatctataagacccctccaataaaggattttggcggcttcaatttctcacaaattttgcccgatccatctaagccgtccaagcgatcatttattgaggatctgctgttcaacaaagtcactctcgccgacgcggggtttattaaacaatatggcgattgcctgggcgacatcgccgccagggaccttatatgcgcccagaagttcaacggtctcaccgtgctgccaccattgttgactgacgaaatgatcgcacagtatacgtcagcgctgctggctggtaccattacttctggctggacattcggagccggtgcagcccttcagattccatttgcaatgcagatggcctatagatttaatggaataggagtgacgcagaacgtattgtacgagaatcaaaagttgatcgcaaaccagttcaattctgccattggaaagatacaagattccctttcttctaccgcctcagccctgggtaagttgcaagatgtcgtcaaccaaaatgcacaggctttgaataccttggtaaaacaattgtcatccaatttcggcgccataagctcagtacttaacgatatcttgtcacgattggatccccccgaagccgaggtccaaatcgataggctcatcacgggacggctccagagccttcaaacctatgtgacgcaacaactgatacgggccgcagaaatccgagcgtccgccaacttggcagctaccaagatgtccgaatgtgtactgggtcaatcaaagagagttgatttctgtggaaaaggataccatctcatgtcattcccccaaagcgccccgcacggcgtcgtgttcctccatgtgacttacgttccagcacaagaaaaaaacttcacaactgcgcccgctatctgccatgacgggaaggcgcacttcccacgagagggtgtatttgtgtcaaatggaacgcactggttcgtaacgcaaaggaacttctatgaaccgcagataatcacgactgacaacacttttgtatctggcaattgtgatgtggtcatcgggatagttaacaacactgtctatgacccgctgcaacccgagcttgattcatttaaagaagaactcgataaatatttcaagaatcacaccagtcccgatgtggaccttggagacatttccgggataaatgcctctgtggtaaacatccaaaaggaaatcgatcggctgaatgaagtggccaaaaacttgaacgaaagtctgatagaccttcaggagctcgggaagtatgaacaagggagcggttatattcctgaagctccaagagatgggcaagcttacgttcgtaaagatggcgaatgggtacttctttctacctttttatgatga

SEQ ID NO: 82 - DNA, 3723 bp, Artificial Sequence
  Description of Artificial Sequence: Synthetic polynucleotide
  pKL056
atgtaccgaatgcagctcttgtcctgcattgctctcagccttgcacttgtgaccaattccactacccgcacacagctcccgccggcgtacactaactccttcacccggggggtttactacccggacaaagtgttccgcagcagtgtcctgcattcaacacaagatttgttccttccattctttagcaatgtcacttggttccatgctatacacgtgagtggcactaacggcactaagcgcttcgataacccggttctgccgtttaatgatggcgtttacttcgcaagtactgagaaatcaaacattatacgggggtggatattcggtactacattggatagtaaaactcaaagccttttgattgtcaacaatgcaactaatgtagtcataaaagtttgtgaattccaattctgtaacgatccctttcttggtgtgtattaccacaagaataacaaatcatggatggagtctgaatttcgagtatacagtagcgccaataattgcacgtttgagtatgtaagccagccgtttctgatggacttggaaggaaagcaaggcaactttaagaacctcagggagttcgtattcaaaaatatagacggttacttcaagatttactcaaaacatacacctatcaacttggtccgagatctcccacaaggtttttcagcgctcgagccattggtggacctgcccatcggaatcaacattacccgattccagacactgcttgcactgcaccggagttatctcacacccggcgacagctcgtctggttggacggcgggagctgccgcttactatgtcggttacttgcaacctcggacatttcttctgaagtataacgaaaacggtacgatcaccgatgccgtagactgcgctctcgatcccctttcagagacgaagtgcacgctcaaatcatttactgtggaaaaaggaatttatcaaacgagcaatttcagggtgcaacccacggagtccatcgtacgattcccaaacataacaaatctttgcccgtttggcgaggtttttaatgctacgcgctttgcatcagtgtacgcttggaataggaaacgaatctcaaattgtgttgcggattattccgtgttgtataattccgcaagcttctccacctttaaatgttatggcgtgtcccccacaaaacttaacgatctttgctttacaaatgtctatgcggattcattcgttatccgaggggatgaagtgcgacaaatcgctcctgggcagacagggaagatagctgattacaattacaaacttccagacgattttacaggatgtgtaatcgcgtggaactcaaacaatttggacagtaaggttggtggcaactacaattatctgtatagacttttcagaaaaagtaacctcaaacctttcgaacgcgacattagcactgagatataccaggccggatcaactccttgtaacggtgttgaaggtttcaactgttactttccgctccaatcctacggctttcaaccaacgaacggtgtcgggtaccaaccatacagagttgtcgtcttgagttttgagcttttgcacgcacctgcaaccgtgtgtggtccgaagaaaagtactaatctggttaaaaataaatgcgtcaatttcaactttaatgggttgacgggcacaggcgtgctgacagagtccaataaaaagtttttgccctttcagcagtttgggagggacatcgccgatacgaccgatgccgtccgagatcctcaaacccttgaaatattggacattaccccctgtagttttggcggtgtaagtgtgattactcccggaacgaatacatctaaccaggtagcggtgctttatcaagatgtcaactgtacagaggtccccgtggcgattcacgccgatcagttgacacccacatggagggtttacagcacaggatccaacgtcttccagacgagagcaggatgcttgatcggtgccgagcatgtgaataacagctacgaatgtgacattccgattggtgctggaatctgcgcaagttaccaaactcaaacgaattcccctggctccgcctcctctgtggcatcccagtctataatcgcgtatacgatgtcactgggcgccgagaattctgtcgcatatagcaacaactccatcgcaatacccacaaattttacaatttctgtgaccacggaaattctgcccgtcagcatgacaaaaactagcgtggactgcacgatgtatatctgcggcgactccacagagtgttccaacctcctcttgcaatatggcagcttttgcacacaattgaaccgagcgctcaccgggatagcggtcgagcaagataagaatacccaagaggtgtttgcccaggtgaagcaaatctataagacccctccaataaaggattttggcggcttcaatttctcacaaattttgcccgatccatctaagccgtccaagcgatcatttattgaggatctgctgttcaacaaagtcactctcgccgacgcggggtttattaaacaatatggcgattgcctgggcgacatcgccgccagggaccttatatgcgcccagaagttcaacggtctcaccgtgctgccaccattgttgactgacgaaatgatcgcacagtatacgtcagcgctgctggctggtaccattacttctggctggacattcggagccggtgcagcccttcagattccatttgcaatgcagatggcctatagatttaatggaataggagtgacgcagaacgtattgtacgagaatcaaaagttgatcgcaaaccagttcaattctgccattggaaagatacaagattccctttcttctaccgcctcagccctgggtaagttgcaagatgtcgtcaaccaaaatgcacaggctttgaataccttggtaaaacaattgtcatccaatttcggcgccataagctcagtacttaacgatatcttgtcacgattggatccccccgaagccgaggtccaaatcgataggctcatcacgggacggctccagagccttcaaacctatgtgacgcaacaactgatacgggccgcagaaatccgagcgtccgccaacttggcagctaccaagatgtccgaatgtgtactgggtcaatcaaagagagttgatttctgtggaaaaggataccatctcatgtcattcccccaaagcgccccgcacggcgtcgtgttcctccatgtgacttacgttccagcacaagaaaaaaacttcacaactgcgcccgctatctgccatgacgggaaggcgcacttcccacgagagggtgtatttgtgtcaaatggaacgcactggttcgtaacgcaaaggaacttctatgaaccgcagataatcacgactgacaacacttttgtatctggcaattgtgatgtggtcatcgggatagttaacaacactgtctatgacccgctgcaacccgagcttgattcatttaaagaagaactcgataaatatttcaagaatcacaccagtcccgatgtggaccttggagacatttccgggataaatgcctctgtggtaaacatccaaaaggaaatcgatcggctgaatgaagtggccaaaaacttgaacgaaagtctgatagaccttcaggagctcgggaagtatgaacaagggagcggttatattcctgaagctccaagagatgggcaagcttacgttcgtaaagatggcgaatgggtacttctttctacctttttatgatga

SEQ ID NO: 83 - DNA, 3723 bp, Artificial Sequence
  Description of Artificial Sequence: Synthetic polynucleotide
  pKL057
atggattggacgtggatactgttccttgtggctgcagccactcgcgttcactcaaacttgactacccgcacacagctcccgccggcgtacactaactccttcacccggggggtttactacccggacaaagtgttccgcagcagtgtcctgcattcaacacaagatttgttccttccattctttagcaatgtcacttggttccatgctatacacgtgagtggcactaacggcactaagcgcttcgataacccggttctgccgtttaatgatggcgtttacttcgcaagtactgagaaatcaaacattatacgggggtggatattcggtactacattggatagtaaaactcaaagccttttgattgtcaacaatgcaactaatgtagtcataaaagtttgtgaattccaattctgtaacgatccctttcttggtgtgtattaccacaagaataacaaatcatggatggagtctgaatttcgagtatacagtagcgccaataattgcacgtttgagtatgtaagccagccgtttctgatggacttggaaggaaagcaaggcaactttaagaacctcagggagttcgtattcaaaaatatagacggttacttcaagatttactcaaaacatacacctatcaacttggtccgagatctcccacaaggtttttcagcgctcgagccattggtggacctgcccatcggaatcaacattacccgattccagacactgcttgcactgcaccggagttatctcacacccggcgacagctcgtctggttggacggcgggagctgccgcttactatgtcggttacttgcaacctcggacatttcttctgaagtataacgaaaacggtacgatcaccgatgccgtagactgcgctctcgatcccctttcagagacgaagtgcacgctcaaatcatttactgtggaaaaaggaatttatcaaacgagcaatttcagggtgcaacccacggagtccatcgtacgattcccaaacataacaaatctttgcccgtttggcgaggtttttaatgctacgcgctttgcatcagtgtacgcttggaataggaaacgaatctcaaattgtgttgcggattattccgtgttgtataattccgcaagcttctccacctttaaatgttatggcgtgtcccccacaaaacttaacgatctttgctttacaaatgtctatgcggattcattcgttatccgaggggatgaagtgcgacaaatcgctcctgggcagacagggaagatagctgattacaattacaaacttccagacgattttacaggatgtgtaatcgcgtggaactcaaacaatttggacagtaaggttggtggcaactacaattatctgtatagacttttcagaaaaagtaacctcaaacctttcgaacgcgacattagcactgagatataccaggccggatcaactccttgtaacggtgttgaaggtttcaactgttactttccgctccaatcctacggctttcaaccaacgaacggtgtcgggtaccaaccatacagagttgtcgtcttgagttttgagcttttgcacgcacctgcaaccgtgtgtggtccgaagaaaagtactaatctggttaaaaataaatgcgtcaatttcaactttaatgggttgacgggcacaggcgtgctgacagagtccaataaaaagtttttgccctttcagcagtttgggagggacatcgccgatacgaccgatgccgtccgagatcctcaaacccttgaaatattggacattaccccctgtagttttggcggtgtaagtgtgattactcccggaacgaatacatctaaccaggtagcggtgctttatcaagatgtcaactgtacagaggtccccgtggcgattcacgccgatcagttgacacccacatggagggtttacagcacaggatccaacgtcttccagacgagagcaggatgcttgatcggtgccgagcatgtgaataacagctacgaatgtgacattccgattggtgctggaatctgcgcaagttaccaaactcaaacgaattcccctggctccgcctcctctgtggcatcccagtctataatcgcgtatacgatgtcactgggcgccgagaattctgtcgcatatagcaacaactccatcgcaatacccacaaattttacaatttctgtgaccacggaaattctgcccgtcagcatgacaaaaactagcgtggactgcacgatgtatatctgcggcgactccacagagtgttccaacctcctcttgcaatatggcagcttttgcacacaattgaaccgagcgctcaccgggatagcggtcgagcaagataagaatacccaagaggtgtttgcccaggtgaagcaaatctataagacccctccaataaaggattttggcggcttcaatttctcacaaattttgcccgatccatctaagccgtccaagcgatcatttattgaggatctgctgttcaacaaagtcactctcgccgacgcggggtttattaaacaatatggcgattgcctgggcgacatcgccgccagggaccttatatgcgcccagaagttcaacggtctcaccgtgctgccaccattgttgactgacgaaatgatcgcacagtatacgtcagcgctgctggctggtaccattacttctggctggacattcggagccggtgcagcccttcagattccatttgcaatgcagatggcctatagatttaatggaataggagtgacgcagaacgtattgtacgagaatcaaaagttgatcgcaaaccagttcaattctgccattggaaagatacaagattccctttcttctaccgcctcagccctgggtaagttgcaagatgtcgtcaaccaaaatgcacaggctttgaataccttggtaaaacaattgtcatccaatttcggcgccataagctcagtacttaacgatatcttgtcacgattggatccccccgaagccgaggtccaaatcgataggctcatcacgggacggctccagagccttcaaacctatgtgacgcaacaactgatacgggccgcagaaatccgagcgtccgccaacttggcagctaccaagatgtccgaatgtgtactgggtcaatcaaagagagttgatttctgtggaaaaggataccatctcatgtcattcccccaaagcgccccgcacggcgtcgtgttcctccatgtgacttacgttccagcacaagaaaaaaacttcacaactgcgcccgctatctgccatgacgggaaggcgcacttcccacgagagggtgtatttgtgtcaaatggaacgcactggttcgtaacgcaaaggaacttctatgaaccgcagataatcacgactgacaacacttttgtatctggcaattgtgatgtggtcatcgggatagttaacaacactgtctatgacccgctgcaacccgagcttgattcatttaaagaagaactcgataaatatttcaagaatcacaccagtcccgatgtggaccttggagacatttccgggataaatgcctctgtggtaaacatccaaaaggaaatcgatcggctgaatgaagtggccaaaaacttgaacgaaagtctgatagaccttcaggagctcgggaagtatgaacaagggagcggttatattcctgaagctccaagagatgggcaagcttacgttcgtaaagatggcgaatgggtacttctttctacctttttatgatga

SEQ ID NO: 84 - DNA, 3717 bp, Artificial Sequence
  Description of Artificial Sequence: Synthetic polynucleotide
  pKL058
atggattggacgtggatactgttccttgtggctgcagccactcgcgttcactcaactacccgcacacagctcccgccggcgtacactaactccttcacccggggggtttactacccggacaaagtgttccgcagcagtgtcctgcattcaacacaagatttgttccttccattctttagcaatgtcacttggttccatgctatacacgtgagtggcactaacggcactaagcgcttcgataacccggttctgccgtttaatgatggcgtttacttcgcaagtactgagaaatcaaacattatacgggggtggatattcggtactacattggatagtaaaactcaaagccttttgattgtcaacaatgcaactaatgtagtcataaaagtttgtgaattccaattctgtaacgatccctttcttggtgtgtattaccacaagaataacaaatcatggatggagtctgaatttcgagtatacagtagcgccaataattgcacgtttgagtatgtaagccagccgtttctgatggacttggaaggaaagcaaggcaactttaagaacctcagggagttcgtattcaaaaatatagacggttacttcaagatttactcaaaacatacacctatcaacttggtccgagatctcccacaaggtttttcagcgctcgagccattggtggacctgcccatcggaatcaacattacccgattccagacactgcttgcactgcaccggagttatctcacacccggcgacagctcgtctggttggacggcgggagctgccgcttactatgtcggttacttgcaacctcggacatttcttctgaagtataacgaaaacggtacgatcaccgatgccgtagactgcgctctcgatcccctttcagagacgaagtgcacgctcaaatcatttactgtggaaaaaggaatttatcaaacgagcaatttcagggtgcaacccacggagtccatcgtacgattcccaaacataacaaatctttgcccgtttggcgaggtttttaatgctacgcgctttgcatcagtgtacgcttggaataggaaacgaatctcaaattgtgttgcggattattccgtgttgtataattccgcaagcttctccacctttaaatgttatggcgtgtcccccacaaaacttaacgatctttgctttacaaatgtctatgcggattcattcgttatccgaggggatgaagtgcgacaaatcgctcctgggcagacagggaagatagctgattacaattacaaacttccagacgattttacaggatgtgtaatcgcgtggaactcaaacaatttggacagtaaggttggtggcaactacaattatctgtatagacttttcagaaaaagtaacctcaaacctttcgaacgcgacattagcactgagatataccaggccggatcaactccttgtaacggtgttgaaggtttcaactgttactttccgctccaatcctacggctttcaaccaacgaacggtgtcgggtaccaaccatacagagttgtcgtcttgagttttgagcttttgcacgcacctgcaaccgtgtgtggtccgaagaaaagtactaatctggttaaaaataaatgcgtcaatttcaactttaatgggttgacgggcacaggcgtgctgacagagtccaataaaaagtttttgccctttcagcagtttgggagggacatcgccgatacgaccgatgccgtccgagatcctcaaacccttgaaatattggacattaccccctgtagttttggcggtgtaagtgtgattactcccggaacgaatacatctaaccaggtagcggtgctttatcaagatgtcaactgtacagaggtccccgtggcgattcacgccgatcagttgacacccacatggagggtttacagcacaggatccaacgtcttccagacgagagcaggatgcttgatcggtgccgagcatgtgaataacagctacgaatgtgacattccgattggtgctggaatctgcgcaagttaccaaactcaaacgaattcccctggctccgcctcctctgtggcatcccagtctataatcgcgtatacgatgtcactgggcgccgagaattctgtcgcatatagcaacaactccatcgcaatacccacaaattttacaatttctgtgaccacggaaattctgcccgtcagcatgacaaaaactagcgtggactgcacgatgtatatctgcggcgactccacagagtgttccaacctcctcttgcaatatggcagcttttgcacacaattgaaccgagcgctcaccgggatagcggtcgagcaagataagaatacccaagaggtgtttgcccaggtgaagcaaatctataagacccctccaataaaggattttggcggcttcaatttctcacaaattttgcccgatccatctaagccgtccaagcgatcatttattgaggatctgctgttcaacaaagtcactctcgccgacgcggggtttattaaacaatatggcgattgcctgggcgacatcgccgccagggaccttatatgcgcccagaagttcaacggtctcaccgtgctgccaccattgttgactgacgaaatgatcgcacagtatacgtcagcgctgctggctggtaccattacttctggctggacattcggagccggtgcagcccttcagattccatttgcaatgcagatggcctatagatttaatggaataggagtgacgcagaacgtattgtacgagaatcaaaagttgatcgcaaaccagttcaattctgccattggaaagatacaagattccctttcttctaccgcctcagccctgggtaagttgcaagatgtcgtcaaccaaaatgcacaggctttgaataccttggtaaaacaattgtcatccaatttcggcgccataagctcagtacttaacgatatcttgtcacgattggatccccccgaagccgaggtccaaatcgataggctcatcacgggacggctccagagccttcaaacctatgtgacgcaacaactgatacgggccgcagaaatccgagcgtccgccaacttggcagctaccaagatgtccgaatgtgtactgggtcaatcaaagagagttgatttctgtggaaaaggataccatctcatgtcattcccccaaagcgccccgcacggcgtcgtgttcctccatgtgacttacgttccagcacaagaaaaaaacttcacaactgcgcccgctatctgccatgacgggaaggcgcacttcccacgagagggtgtatttgtgtcaaatggaacgcactggttcgtaacgcaaaggaacttctatgaaccgcagataatcacgactgacaacacttttgtatctggcaattgtgatgtggtcatcgggatagttaacaacactgtctatgacccgctgcaacccgagcttgattcatttaaagaagaactcgataaatatttcaagaatcacaccagtcccgatgtggaccttggagacatttccgggataaatgcctctgtggtaaacatccaaaaggaaatcgatcggctgaatgaagtggccaaaaacttgaacgaaagtctgatagaccttcaggagctcgggaagtatgaacaagggagcggttatattcctgaagctccaagagatgggcaagcttacgttcgtaaagatggcgaatgggtacttctttctacctttttatgatga

SEQ ID NO: 85 - DNA, 3729 bp, Artificial Sequence
  Description of Artificial Sequence: Synthetic polynucleotide
  pKL059
atggaaactcctgcggagttgctgttccttctgcttctttggctccctgatacaacgggaaacttgactacccgcacacagctcccgccggcgtacactaactccttcacccggggggtttactacccggacaaagtgttccgcagcagtgtcctgcattcaacacaagatttgttccttccattctttagcaatgtcacttggttccatgctatacacgtgagtggcactaacggcactaagcgcttcgataacccggttctgccgtttaatgatggcgtttacttcgcaagtactgagaaatcaaacattatacgggggtggatattcggtactacattggatagtaaaactcaaagccttttgattgtcaacaatgcaactaatgtagtcataaaagtttgtgaattccaattctgtaacgatccctttcttggtgtgtattaccacaagaataacaaatcatggatggagtctgaatttcgagtatacagtagcgccaataattgcacgtttgagtatgtaagccagccgtttctgatggacttggaaggaaagcaaggcaactttaagaacctcagggagttcgtattcaaaaatatagacggttacttcaagatttactcaaaacatacacctatcaacttggtccgagatctcccacaaggtttttcagcgctcgagccattggtggacctgcccatcggaatcaacattacccgattccagacactgcttgcactgcaccggagttatctcacacccggcgacagctcgtctggttggacggcgggagctgccgcttactatgtcggttacttgcaacctcggacatttcttctgaagtataacgaaaacggtacgatcaccgatgccgtagactgcgctctcgatcccctttcagagacgaagtgcacgctcaaatcatttactgtggaaaaaggaatttatcaaacgagcaatttcagggtgcaacccacggagtccatcgtacgattcccaaacataacaaatctttgcccgtttggcgaggtttttaatgctacgcgctttgcatcagtgtacgcttggaataggaaacgaatctcaaattgtgttgcggattattccgtgttgtataattccgcaagcttctccacctttaaatgttatggcgtgtcccccacaaaacttaacgatctttgctttacaaatgtctatgcggattcattcgttatccgaggggatgaagtgcgacaaatcgctcctgggcagacagggaagatagctgattacaattacaaacttccagacgattttacaggatgtgtaatcgcgtggaactcaaacaatttggacagtaaggttggtggcaactacaattatctgtatagacttttcagaaaaagtaacctcaaacctttcgaacgcgacattagcactgagatataccaggccggatcaactccttgtaacggtgttgaaggtttcaactgttactttccgctccaatcctacggctttcaaccaacgaacggtgtcgggtaccaaccatacagagttgtcgtcttgagttttgagcttttgcacgcacctgcaaccgtgtgtggtccgaagaaaagtactaatctggttaaaaataaatgcgtcaatttcaactttaatgggttgacgggcacaggcgtgctgacagagtccaataaaaagtttttgccctttcagcagtttgggagggacatcgccgatacgaccgatgccgtccgagatcctcaaacccttgaaatattggacattaccccctgtagttttggcggtgtaagtgtgattactcccggaacgaatacatctaaccaggtagcggtgctttatcaagatgtcaactgtacagaggtccccgtggcgattcacgccgatcagttgacacccacatggagggtttacagcacaggatccaacgtcttccagacgagagcaggatgcttgatcggtgccgagcatgtgaataacagctacgaatgtgacattccgattggtgctggaatctgcgcaagttaccaaactcaaacgaattcccctggctccgcctcctctgtggcatcccagtctataatcgcgtatacgatgtcactgggcgccgagaattctgtcgcatatagcaacaactccatcgcaatacccacaaattttacaatttctgtgaccacggaaattctgcccgtcagcatgacaaaaactagcgtggactgcacgatgtatatctgcggcgactccacagagtgttccaacctcctcttgcaatatggcagcttttgcacacaattgaaccgagcgctcaccgggatagcggtcgagcaagataagaatacccaagaggtgtttgcccaggtgaagcaaatctataagacccctccaataaaggattttggcggcttcaatttctcacaaattttgcccgatccatctaagccgtccaagcgatcatttattgaggatctgctgttcaacaaagtcactctcgccgacgcggggtttattaaacaatatggcgattgcctgggcgacatcgccgccagggaccttatatgcgcccagaagttcaacggtctcaccgtgctgccaccattgttgactgacgaaatgatcgcacagtatacgtcagcgctgctggctggtaccattacttctggctggacattcggagccggtgcagcccttcagattccatttgcaatgcagatggcctatagatttaatggaataggagtgacgcagaacgtattgtacgagaatcaaaagttgatcgcaaaccagttcaattctgccattggaaagatacaagattccctttcttctaccgcctcagccctgggtaagttgcaagatgtcgtcaaccaaaatgcacaggctttgaataccttggtaaaacaattgtcatccaatttcggcgccataagctcagtacttaacgatatcttgtcacgattggatccccccgaagccgaggtccaaatcgataggctcatcacgggacggctccagagccttcaaacctatgtgacgcaacaactgatacgggccgcagaaatccgagcgtccgccaacttggcagctaccaagatgtccgaatgtgtactgggtcaatcaaagagagttgatttctgtggaaaaggataccatctcatgtcattcccccaaagcgccccgcacggcgtcgtgttcctccatgtgacttacgttccagcacaagaaaaaaacttcacaactgcgcccgctatctgccatgacgggaaggcgcacttcccacgagagggtgtatttgtgtcaaatggaacgcactggttcgtaacgcaaaggaacttctatgaaccgcagataatcacgactgacaacacttttgtatctggcaattgtgatgtggtcatcgggatagttaacaacactgtctatgacccgctgcaacccgagcttgattcatttaaagaagaactcgataaatatttcaagaatcacaccagtcccgatgtggaccttggagacatttccgggataaatgcctctgtggtaaacatccaaaaggaaatcgatcggctgaatgaagtggccaaaaacttgaacgaaagtctgatagaccttcaggagctcgggaagtatgaacaagggagcggttatattcctgaagctccaagagatgggcaagcttacgttcgtaaagatggcgaatgggtacttctttctacctttttatgatga

SEQ ID NO: 86 - DNA, 3723 bp, Artificial Sequence
  Description of Artificial Sequence: Synthetic polynucleotide
  pKL060
atggaaactcctgcggagttgctgttccttctgcttctttggctccctgatacaacgggaactacccgcacacagctcccgccggcgtacactaactccttcacccggggggtttactacccggacaaagtgttccgcagcagtgtcctgcattcaacacaagatttgttccttccattctttagcaatgtcacttggttccatgctatacacgtgagtggcactaacggcactaagcgcttcgataacccggttctgccgtttaatgatggcgtttacttcgcaagtactgagaaatcaaacattatacgggggtggatattcggtactacattggatagtaaaactcaaagccttttgattgtcaacaatgcaactaatgtagtcataaaagtttgtgaattccaattctgtaacgatccctttcttggtgtgtattaccacaagaataacaaatcatggatggagtctgaatttcgagtatacagtagcgccaataattgcacgtttgagtatgtaagccagccgtttctgatggacttggaaggaaagcaaggcaactttaagaacctcagggagttcgtattcaaaaatatagacggttacttcaagatttactcaaaacatacacctatcaacttggtccgagatctcccacaaggtttttcagcgctcgagccattggtggacctgcccatcggaatcaacattacccgattccagacactgcttgcactgcaccggagttatctcacacccggcgacagctcgtctggttggacggcgggagctgccgcttactatgtcggttacttgcaacctcggacatttcttctgaagtataacgaaaacggtacgatcaccgatgccgtagactgcgctctcgatcccctttcagagacgaagtgcacgctcaaatcatttactgtggaaaaaggaatttatcaaacgagcaatttcagggtgcaacccacggagtccatcgtacgattcccaaacataacaaatctttgcccgtttggcgaggtttttaatgctacgcgctttgcatcagtgtacgcttggaataggaaacgaatctcaaattgtgttgcggattattccgtgttgtataattccgcaagcttctccacctttaaatgttatggcgtgtcccccacaaaacttaacgatctttgctttacaaatgtctatgcggattcattcgttatccgaggggatgaagtgcgacaaatcgctcctgggcagacagggaagatagctgattacaattacaaacttccagacgattttacaggatgtgtaatcgcgtggaactcaaacaatttggacagtaaggttggtggcaactacaattatctgtatagacttttcagaaaaagtaacctcaaacctttcgaacgcgacattagcactgagatataccaggccggatcaactccttgtaacggtgttgaaggtttcaactgttactttccgctccaatcctacggctttcaaccaacgaacggtgtcgggtaccaaccatacagagttgtcgtcttgagttttgagcttttgcacgcacctgcaaccgtgtgtggtccgaagaaaagtactaatctggttaaaaataaatgcgtcaatttcaactttaatgggttgacgggcacaggcgtgctgacagagtccaataaaaagtttttgccctttcagcagtttgggagggacatcgccgatacgaccgatgccgtccgagatcctcaaacccttgaaatattggacattaccccctgtagttttggcggtgtaagtgtgattactcccggaacgaatacatctaaccaggtagcggtgctttatcaagatgtcaactgtacagaggtccccgtggcgattcacgccgatcagttgacacccacatggagggtttacagcacaggatccaacgtcttccagacgagagcaggatgcttgatcggtgccgagcatgtgaataacagctacgaatgtgacattccgattggtgctggaatctgcgcaagttaccaaactcaaacgaattcccctggctccgcctcctctgtggcatcccagtctataatcgcgtatacgatgtcactgggcgccgagaattctgtcgcatatagcaacaactccatcgcaatacccacaaattttacaatttctgtgaccacggaaattctgcccgtcagcatgacaaaaactagcgtggactgcacgatgtatatctgcggcgactccacagagtgttccaacctcctcttgcaatatggcagcttttgcacacaattgaaccgagcgctcaccgggatagcggtcgagcaagataagaatacccaagaggtgtttgcccaggtgaagcaaatctataagacccctccaataaaggattttggcggcttcaatttctcacaaattttgcccgatccatctaagccgtccaagcgatcatttattgaggatctgctgttcaacaaagtcactctcgccgacgcggggtttattaaacaatatggcgattgcctgggcgacatcgccgccagggaccttatatgcgcccagaagttcaacggtctcaccgtgctgccaccattgttgactgacgaaatgatcgcacagtatacgtcagcgctgctggctggtaccattacttctggctggacattcggagccggtgcagcccttcagattccatttgcaatgcagatggcctatagatttaatggaataggagtgacgcagaacgtattgtacgagaatcaaaagttgatcgcaaaccagttcaattctgccattggaaagatacaagattccctttcttctaccgcctcagccctgggtaagttgcaagatgtcgtcaaccaaaatgcacaggctttgaataccttggtaaaacaattgtcatccaatttcggcgccataagctcagtacttaacgatatcttgtcacgattggatccccccgaagccgaggtccaaatcgataggctcatcacgggacggctccagagccttcaaacctatgtgacgcaacaactgatacgggccgcagaaatccgagcgtccgccaacttggcagctaccaagatgtccgaatgtgtactgggtcaatcaaagagagttgatttctgtggaaaaggataccatctcatgtcattcccccaaagcgccccgcacggcgtcgtgttcctccatgtgacttacgttccagcacaagaaaaaaacttcacaactgcgcccgctatctgccatgacgggaaggcgcacttcccacgagagggtgtatttgtgtcaaatggaacgcactggttcgtaacgcaaaggaacttctatgaaccgcagataatcacgactgacaacacttttgtatctggcaattgtgatgtggtcatcgggatagttaacaacactgtctatgacccgctgcaacccgagcttgattcatttaaagaagaactcgataaatatttcaagaatcacaccagtcccgatgtggaccttggagacatttccgggataaatgcctctgtggtaaacatccaaaaggaaatcgatcggctgaatgaagtggccaaaaacttgaacgaaagtctgatagaccttcaggagctcgggaagtatgaacaagggagcggttatattcctgaagctccaagagatgggcaagcttacgttcgtaaagatggcgaatgggtacttctttctacctttttatgatga

SEQ ID NO: 87 - DNA, 3732 bp, Artificial Sequence
  Description of Artificial Sequence: Synthetic polynucleotide
  pKL061
atgaacgaggggtccatcatgtggctcgcgtccttggccgttgtgattgcatgtgccggagctaacttgactacccgcacacagctcccgccggcgtacactaactccttcacccggggggtttactacccggacaaagtgttccgcagcagtgtcctgcattcaacacaagatttgttccttccattctttagcaatgtcacttggttccatgctatacacgtgagtggcactaacggcactaagcgcttcgataacccggttctgccgtttaatgatggcgtttacttcgcaagtactgagaaatcaaacattatacgggggtggatattcggtactacattggatagtaaaactcaaagccttttgattgtcaacaatgcaactaatgtagtcataaaagtttgtgaattccaattctgtaacgatccctttcttggtgtgtattaccacaagaataacaaatcatggatggagtctgaatttcgagtatacagtagcgccaataattgcacgtttgagtatgtaagccagccgtttctgatggacttggaaggaaagcaaggcaactttaagaacctcagggagttcgtattcaaaaatatagacggttacttcaagatttactcaaaacatacacctatcaacttggtccgagatctcccacaaggtttttcagcgctcgagccattggtggacctgcccatcggaatcaacattacccgattccagacactgcttgcactgcaccggagttatctcacacccggcgacagctcgtctggttggacggcgggagctgccgcttactatgtcggttacttgcaacctcggacatttcttctgaagtataacgaaaacggtacgatcaccgatgccgtagactgcgctctcgatcccctttcagagacgaagtgcacgctcaaatcatttactgtggaaaaaggaatttatcaaacgagcaatttcagggtgcaacccacggagtccatcgtacgattcccaaacataacaaatctttgcccgtttggcgaggtttttaatgctacgcgctttgcatcagtgtacgcttggaataggaaacgaatctcaaattgtgttgcggattattccgtgttgtataattccgcaagcttctccacctttaaatgttatggcgtgtcccccacaaaacttaacgatctttgctttacaaatgtctatgcggattcattcgttatccgaggggatgaagtgcgacaaatcgctcctgggcagacagggaagatagctgattacaattacaaacttccagacgattttacaggatgtgtaatcgcgtggaactcaaacaatttggacagtaaggttggtggcaactacaattatctgtatagacttttcagaaaaagtaacctcaaacctttcgaacgcgacattagcactgagatataccaggccggatcaactccttgtaacggtgttgaaggtttcaactgttactttccgctccaatcctacggctttcaaccaacgaacggtgtcgggtaccaaccatacagagttgtcgtcttgagttttgagcttttgcacgcacctgcaaccgtgtgtggtccgaagaaaagtactaatctggttaaaaataaatgcgtcaatttcaactttaatgggttgacgggcacaggcgtgctgacagagtccaataaaaagtttttgccctttcagcagtttgggagggacatcgccgatacgaccgatgccgtccgagatcctcaaacccttgaaatattggacattaccccctgtagttttggcggtgtaagtgtgattactcccggaacgaatacatctaaccaggtagcggtgctttatcaagatgtcaactgtacagaggtccccgtggcgattcacgccgatcagttgacacccacatggagggtttacagcacaggatccaacgtcttccagacgagagcaggatgcttgatcggtgccgagcatgtgaataacagctacgaatgtgacattccgattggtgctggaatctgcgcaagttaccaaactcaaacgaattcccctggctccgcctcctctgtggcatcccagtctataatcgcgtatacgatgtcactgggcgccgagaattctgtcgcatatagcaacaactccatcgcaatacccacaaattttacaatttctgtgaccacggaaattctgcccgtcagcatgacaaaaactagcgtggactgcacgatgtatatctgcggcgactccacagagtgttccaacctcctcttgcaatatggcagcttttgcacacaattgaaccgagcgctcaccgggatagcggtcgagcaagataagaatacccaagaggtgtttgcccaggtgaagcaaatctataagacccctccaataaaggattttggcggcttcaatttctcacaaattttgcccgatccatctaagccgtccaagcgatcatttattgaggatctgctgttcaacaaagtcactctcgccgacgcggggtttattaaacaatatggcgattgcctgggcgacatcgccgccagggaccttatatgcgcccagaagttcaacggtctcaccgtgctgccaccattgttgactgacgaaatgatcgcacagtatacgtcagcgctgctggctggtaccattacttctggctggacattcggagccggtgcagcccttcagattccatttgcaatgcagatggcctatagatttaatggaataggagtgacgcagaacgtattgtacgagaatcaaaagttgatcgcaaaccagttcaattctgccattggaaagatacaagattccctttcttctaccgcctcagccctgggtaagttgcaagatgtcgtcaaccaaaatgcacaggctttgaataccttggtaaaacaattgtcatccaatttcggcgccataagctcagtacttaacgatatcttgtcacgattggatccccccgaagccgaggtccaaatcgataggctcatcacgggacggctccagagccttcaaacctatgtgacgcaacaactgatacgggccgcagaaatccgagcgtccgccaacttggcagctaccaagatgtccgaatgtgtactgggtcaatcaaagagagttgatttctgtggaaaaggataccatctcatgtcattcccccaaagcgccccgcacggcgtcgtgttcctccatgtgacttacgttccagcacaagaaaaaaacttcacaactgcgcccgctatctgccatgacgggaaggcgcacttcccacgagagggtgtatttgtgtcaaatggaacgcactggttcgtaacgcaaaggaacttctatgaaccgcagataatcacgactgacaacacttttgtatctggcaattgtgatgtggtcatcgggatagttaacaacactgtctatgacccgctgcaacccgagcttgattcatttaaagaagaactcgataaatatttcaagaatcacaccagtcccgatgtggaccttggagacatttccgggataaatgcctctgtggtaaacatccaaaaggaaatcgatcggctgaatgaagtggccaaaaacttgaacgaaagtctgatagaccttcaggagctcgggaagtatgaacaagggagcggttatattcctgaagctccaagagatgggcaagcttacgttcgtaaagatggcgaatgggtacttctttctacctttttatgatga

SEQ ID NO: 88 - DNA, 3726 bp, Artificial Sequence
  Description of Artificial Sequence: Synthetic polynucleotide
  pKL062
atgaacgaggggtccatcatgtggctcgcgtccttggccgttgtgattgcatgtgccggagctactacccgcacacagctcccgccggcgtacactaactccttcacccggggggtttactacccggacaaagtgttccgcagcagtgtcctgcattcaacacaagatttgttccttccattctttagcaatgtcacttggttccatgctatacacgtgagtggcactaacggcactaagcgcttcgataacccggttctgccgtttaatgatggcgtttacttcgcaagtactgagaaatcaaacattatacgggggtggatattcggtactacattggatagtaaaactcaaagccttttgattgtcaacaatgcaactaatgtagtcataaaagtttgtgaattccaattctgtaacgatccctttcttggtgtgtattaccacaagaataacaaatcatggatggagtctgaatttcgagtatacagtagcgccaataattgcacgtttgagtatgtaagccagccgtttctgatggacttggaaggaaagcaaggcaactttaagaacctcagggagttcgtattcaaaaatatagacggttacttcaagatttactcaaaacatacacctatcaacttggtccgagatctcccacaaggtttttcagcgctcgagccattggtggacctgcccatcggaatcaacattacccgattccagacactgcttgcactgcaccggagttatctcacacccggcgacagctcgtctggttggacggcgggagctgccgcttactatgtcggttacttgcaacctcggacatttcttctgaagtataacgaaaacggtacgatcaccgatgccgtagactgcgctctcgatcccctttcagagacgaagtgcacgctcaaatcatttactgtggaaaaaggaatttatcaaacgagcaatttcagggtgcaacccacggagtccatcgtacgattcccaaacataacaaatctttgcccgtttggcgaggtttttaatgctacgcgctttgcatcagtgtacgcttggaataggaaacgaatctcaaattgtgttgcggattattccgtgttgtataattccgcaagcttctccacctttaaatgttatggcgtgtcccccacaaaacttaacgatctttgctttacaaatgtctatgcggattcattcgttatccgaggggatgaagtgcgacaaatcgctcctgggcagacagggaagatagctgattacaattacaaacttccagacgattttacaggatgtgtaatcgcgtggaactcaaacaatttggacagtaaggttggtggcaactacaattatctgtatagacttttcagaaaaagtaacctcaaacctttcgaacgcgacattagcactgagatataccaggccggatcaactccttgtaacggtgttgaaggtttcaactgttactttccgctccaatcctacggctttcaaccaacgaacggtgtcgggtaccaaccatacagagttgtcgtcttgagttttgagcttttgcacgcacctgcaaccgtgtgtggtccgaagaaaagtactaatctggttaaaaataaatgcgtcaatttcaactttaatgggttgacgggcacaggcgtgctgacagagtccaataaaaagtttttgccctttcagcagtttgggagggacatcgccgatacgaccgatgccgtccgagatcctcaaacccttgaaatattggacattaccccctgtagttttggcggtgtaagtgtgattactcccggaacgaatacatctaaccaggtagcggtgctttatcaagatgtcaactgtacagaggtccccgtggcgattcacgccgatcagttgacacccacatggagggtttacagcacaggatccaacgtcttccagacgagagcaggatgcttgatcggtgccgagcatgtgaataacagctacgaatgtgacattccgattggtgctggaatctgcgcaagttaccaaactcaaacgaattcccctggctccgcctcctctgtggcatcccagtctataatcgcgtatacgatgtcactgggcgccgagaattctgtcgcatatagcaacaactccatcgcaatacccacaaattttacaatttctgtgaccacggaaattctgcccgtcagcatgacaaaaactagcgtggactgcacgatgtatatctgcggcgactccacagagtgttccaacctcctcttgcaatatggcagcttttgcacacaattgaaccgagcgctcaccgggatagcggtcgagcaagataagaatacccaagaggtgtttgcccaggtgaagcaaatctataagacccctccaataaaggattttggcggcttcaatttctcacaaattttgcccgatccatctaagccgtccaagcgatcatttattgaggatctgctgttcaacaaagtcactctcgccgacgcggggtttattaaacaatatggcgattgcctgggcgacatcgccgccagggaccttatatgcgcccagaagttcaacggtctcaccgtgctgccaccattgttgactgacgaaatgatcgcacagtatacgtcagcgctgctggctggtaccattacttctggctggacattcggagccggtgcagcccttcagattccatttgcaatgcagatggcctatagatttaatggaataggagtgacgcagaacgtattgtacgagaatcaaaagttgatcgcaaaccagttcaattctgccattggaaagatacaagattccctttcttctaccgcctcagccctgggtaagttgcaagatgtcgtcaaccaaaatgcacaggctttgaataccttggtaaaacaattgtcatccaatttcggcgccataagctcagtacttaacgatatcttgtcacgattggatccccccgaagccgaggtccaaatcgataggctcatcacgggacggctccagagccttcaaacctatgtgacgcaacaactgatacgggccgcagaaatccgagcgtccgccaacttggcagctaccaagatgtccgaatgtgtactgggtcaatcaaagagagttgatttctgtggaaaaggataccatctcatgtcattcccccaaagcgccccgcacggcgtcgtgttcctccatgtgacttacgttccagcacaagaaaaaaacttcacaactgcgcccgctatctgccatgacgggaaggcgcacttcccacgagagggtgtatttgtgtcaaatggaacgcactggttcgtaacgcaaaggaacttctatgaaccgcagataatcacgactgacaacacttttgtatctggcaattgtgatgtggtcatcgggatagttaacaacactgtctatgacccgctgcaacccgagcttgattcatttaaagaagaactcgataaatatttcaagaatcacaccagtcccgatgtggaccttggagacatttccgggataaatgcctctgtggtaaacatccaaaaggaaatcgatcggctgaatgaagtggccaaaaacttgaacgaaagtctgatagaccttcaggagctcgggaagtatgaacaagggagcggttatattcctgaagctccaagagatgggcaagcttacgttcgtaaagatggcgaatgggtacttctttctacctttttatgatga

SEQ ID NO: 89 - DNA, 3759 bp, Artificial Sequence
  Description of Artificial Sequence: Synthetic polynucleotide
  pKL063
atgggcaggaaacaaaacaaaaggggaggtaatgagggttccatcatgtggttggcttccctcgccgtggttattgcgtgcgctggtgctaacttgactacccgcacacagctcccgccggcgtacactaactccttcacccggggggtttactacccggacaaagtgttccgcagcagtgtcctgcattcaacacaagatttgttccttccattctttagcaatgtcacttggttccatgctatacacgtgagtggcactaacggcactaagcgcttcgataacccggttctgccgtttaatgatggcgtttacttcgcaagtactgagaaatcaaacattatacgggggtggatattcggtactacattggatagtaaaactcaaagccttttgattgtcaacaatgcaactaatgtagtcataaaagtttgtgaattccaattctgtaacgatccctttcttggtgtgtattaccacaagaataacaaatcatggatggagtctgaatttcgagtatacagtagcgccaataattgcacgtttgagtatgtaagccagccgtttctgatggacttggaaggaaagcaaggcaactttaagaacctcagggagttcgtattcaaaaatatagacggttacttcaagatttactcaaaacatacacctatcaacttggtccgagatctcccacaaggtttttcagcgctcgagccattggtggacctgcccatcggaatcaacattacccgattccagacactgcttgcactgcaccggagttatctcacacccggcgacagctcgtctggttggacggcgggagctgccgcttactatgtcggttacttgcaacctcggacatttcttctgaagtataacgaaaacggtacgatcaccgatgccgtagactgcgctctcgatcccctttcagagacgaagtgcacgctcaaatcatttactgtggaaaaaggaatttatcaaacgagcaatttcagggtgcaacccacggagtccatcgtacgattcccaaacataacaaatctttgcccgtttggcgaggtttttaatgctacgcgctttgcatcagtgtacgcttggaataggaaacgaatctcaaattgtgttgcggattattccgtgttgtataattccgcaagcttctccacctttaaatgttatggcgtgtcccccacaaaacttaacgatctttgctttacaaatgtctatgcggattcattcgttatccgaggggatgaagtgcgacaaatcgctcctgggcagacagggaagatagctgattacaattacaaacttccagacgattttacaggatgtgtaatcgcgtggaactcaaacaatttggacagtaaggttggtggcaactacaattatctgtatagacttttcagaaaaagtaacctcaaacctttcgaacgcgacattagcactgagatataccaggccggatcaactccttgtaacggtgttgaaggtttcaactgttactttccgctccaatcctacggctttcaaccaacgaacggtgtcgggtaccaaccatacagagttgtcgtcttgagttttgagcttttgcacgcacctgcaaccgtgtgtggtccgaagaaaagtactaatctggttaaaaataaatgcgtcaatttcaactttaatgggttgacgggcacaggcgtgctgacagagtccaataaaaagtttttgccctttcagcagtttgggagggacatcgccgatacgaccgatgccgtccgagatcctcaaacccttgaaatattggacattaccccctgtagttttggcggtgtaagtgtgattactcccggaacgaatacatctaaccaggtagcggtgctttatcaagatgtcaactgtacagaggtccccgtggcgattcacgccgatcagttgacacccacatggagggtttacagcacaggatccaacgtcttccagacgagagcaggatgcttgatcggtgccgagcatgtgaataacagctacgaatgtgacattccgattggtgctggaatctgcgcaagttaccaaactcaaacgaattcccctggctccgcctcctctgtggcatcccagtctataatcgcgtatacgatgtcactgggcgccgagaattctgtcgcatatagcaacaactccatcgcaatacccacaaattttacaatttctgtgaccacggaaattctgcccgtcagcatgacaaaaactagcgtggactgcacgatgtatatctgcggcgactccacagagtgttccaacctcctcttgcaatatggcagcttttgcacacaattgaaccgagcgctcaccgggatagcggtcgagcaagataagaatacccaagaggtgtttgcccaggtgaagcaaatctataagacccctccaataaaggattttggcggcttcaatttctcacaaattttgcccgatccatctaagccgtccaagcgatcatttattgaggatctgctgttcaacaaagtcactctcgccgacgcggggtttattaaacaatatggcgattgcctgggcgacatcgccgccagggaccttatatgcgcccagaagttcaacggtctcaccgtgctgccaccattgttgactgacgaaatgatcgcacagtatacgtcagcgctgctggctggtaccattacttctggctggacattcggagccggtgcagcccttcagattccatttgcaatgcagatggcctatagatttaatggaataggagtgacgcagaacgtattgtacgagaatcaaaagttgatcgcaaaccagttcaattctgccattggaaagatacaagattccctttcttctaccgcctcagccctgggtaagttgcaagatgtcgtcaaccaaaatgcacaggctttgaataccttggtaaaacaattgtcatccaatttcggcgccataagctcagtacttaacgatatcttgtcacgattggatccccccgaagccgaggtccaaatcgataggctcatcacgggacggctccagagccttcaaacctatgtgacgcaacaactgatacgggccgcagaaatccgagcgtccgccaacttggcagctaccaagatgtccgaatgtgtactgggtcaatcaaagagagttgatttctgtggaaaaggataccatctcatgtcattcccccaaagcgccccgcacggcgtcgtgttcctccatgtgacttacgttccagcacaagaaaaaaacttcacaactgcgcccgctatctgccatgacgggaaggcgcacttcccacgagagggtgtatttgtgtcaaatggaacgcactggttcgtaacgcaaaggaacttctatgaaccgcagataatcacgactgacaacacttttgtatctggcaattgtgatgtggtcatcgggatagttaacaacactgtctatgacccgctgcaacccgagcttgattcatttaaagaagaactcgataaatatttcaagaatcacaccagtcccgatgtggaccttggagacatttccgggataaatgcctctgtggtaaacatccaaaaggaaatcgatcggctgaatgaagtggccaaaaacttgaacgaaagtctgatagaccttcaggagctcgggaagtatgaacaagggagcggttatattcctgaagctccaagagatgggcaagcttacgttcgtaaagatggcgaatgggtacttctttctacctttttatgatga

SEQ ID NO: 90 - DNA, 3753 bp, Artificial Sequence
  Description of Artificial Sequence: Synthetic polynucleotide
  pKL064
atgggcaggaaacaaaacaaaaggggaggtaatgagggttccatcatgtggttggcttccctcgccgtggttattgcgtgcgctggtgctactacccgcacacagctcccgccggcgtacactaactccttcacccggggggtttactacccggacaaagtgttccgcagcagtgtcctgcattcaacacaagatttgttccttccattctttagcaatgtcacttggttccatgctatacacgtgagtggcactaacggcactaagcgcttcgataacccggttctgccgtttaatgatggcgtttacttcgcaagtactgagaaatcaaacattatacgggggtggatattcggtactacattggatagtaaaactcaaagccttttgattgtcaacaatgcaactaatgtagtcataaaagtttgtgaattccaattctgtaacgatccctttcttggtgtgtattaccacaagaataacaaatcatggatggagtctgaatttcgagtatacagtagcgccaataattgcacgtttgagtatgtaagccagccgtttctgatggacttggaaggaaagcaaggcaactttaagaacctcagggagttcgtattcaaaaatatagacggttacttcaagatttactcaaaacatacacctatcaacttggtccgagatctcccacaaggtttttcagcgctcgagccattggtggacctgcccatcggaatcaacattacccgattccagacactgcttgcactgcaccggagttatctcacacccggcgacagctcgtctggttggacggcgggagctgccgcttactatgtcggttacttgcaacctcggacatttcttctgaagtataacgaaaacggtacgatcaccgatgccgtagactgcgctctcgatcccctttcagagacgaagtgcacgctcaaatcatttactgtggaaaaaggaatttatcaaacgagcaatttcagggtgcaacccacggagtccatcgtacgattcccaaacataacaaatctttgcccgtttggcgaggtttttaatgctacgcgctttgcatcagtgtacgcttggaataggaaacgaatctcaaattgtgttgcggattattccgtgttgtataattccgcaagcttctccacctttaaatgttatggcgtgtcccccacaaaacttaacgatctttgctttacaaatgtctatgcggattcattcgttatccgaggggatgaagtgcgacaaatcgctcctgggcagacagggaagatagctgattacaattacaaacttccagacgattttacaggatgtgtaatcgcgtggaactcaaacaatttggacagtaaggttggtggcaactacaattatctgtatagacttttcagaaaaagtaacctcaaacctttcgaacgcgacattagcactgagatataccaggccggatcaactccttgtaacggtgttgaaggtttcaactgttactttccgctccaatcctacggctttcaaccaacgaacggtgtcgggtaccaaccatacagagttgtcgtcttgagttttgagcttttgcacgcacctgcaaccgtgtgtggtccgaagaaaagtactaatctggttaaaaataaatgcgtcaatttcaactttaatgggttgacgggcacaggcgtgctgacagagtccaataaaaagtttttgccctttcagcagtttgggagggacatcgccgatacgaccgatgccgtccgagatcctcaaacccttgaaatattggacattaccccctgtagttttggcggtgtaagtgtgattactcccggaacgaatacatctaaccaggtagcggtgctttatcaagatgtcaactgtacagaggtccccgtggcgattcacgccgatcagttgacacccacatggagggtttacagcacaggatccaacgtcttccagacgagagcaggatgcttgatcggtgccgagcatgtgaataacagctacgaatgtgacattccgattggtgctggaatctgcgcaagttaccaaactcaaacgaattcccctggctccgcctcctctgtggcatcccagtctataatcgcgtatacgatgtcactgggcgccgagaattctgtcgcatatagcaacaactccatcgcaatacccacaaattttacaatttctgtgaccacggaaattctgcccgtcagcatgacaaaaactagcgtggactgcacgatgtatatctgcggcgactccacagagtgttccaacctcctcttgcaatatggcagcttttgcacacaattgaaccgagcgctcaccgggatagcggtcgagcaagataagaatacccaagaggtgtttgcccaggtgaagcaaatctataagacccctccaataaaggattttggcggcttcaatttctcacaaattttgcccgatccatctaagccgtccaagcgatcatttattgaggatctgctgttcaacaaagtcactctcgccgacgcggggtttattaaacaatatggcgattgcctgggcgacatcgccgccagggaccttatatgcgcccagaagttcaacggtctcaccgtgctgccaccattgttgactgacgaaatgatcgcacagtatacgtcagcgctgctggctggtaccattacttctggctggacattcggagccggtgcagcccttcagattccatttgcaatgcagatggcctatagatttaatggaataggagtgacgcagaacgtattgtacgagaatcaaaagttgatcgcaaaccagttcaattctgccattggaaagatacaagattccctttcttctaccgcctcagccctgggtaagttgcaagatgtcgtcaaccaaaatgcacaggctttgaataccttggtaaaacaattgtcatccaatttcggcgccataagctcagtacttaacgatatcttgtcacgattggatccccccgaagccgaggtccaaatcgataggctcatcacgggacggctccagagccttcaaacctatgtgacgcaacaactgatacgggccgcagaaatccgagcgtccgccaacttggcagctaccaagatgtccgaatgtgtactgggtcaatcaaagagagttgatttctgtggaaaaggataccatctcatgtcattcccccaaagcgccccgcacggcgtcgtgttcctccatgtgacttacgttccagcacaagaaaaaaacttcacaactgcgcccgctatctgccatgacgggaaggcgcacttcccacgagagggtgtatttgtgtcaaatggaacgcactggttcgtaacgcaaaggaacttctatgaaccgcagataatcacgactgacaacacttttgtatctggcaattgtgatgtggtcatcgggatagttaacaacactgtctatgacccgctgcaacccgagcttgattcatttaaagaagaactcgataaatatttcaagaatcacaccagtcccgatgtggaccttggagacatttccgggataaatgcctctgtggtaaacatccaaaaggaaatcgatcggctgaatgaagtggccaaaaacttgaacgaaagtctgatagaccttcaggagctcgggaagtatgaacaagggagcggttatattcctgaagctccaagagatgggcaagcttacgttcgtaaagatggcgaatgggtacttctttctacctttttatgatga

SEQ ID NO: 91 - DNA, 3732 bp, Artificial Sequence
  Description of Artificial Sequence: Synthetic polynucleotide
  pKL065
atggaaactgatacactgttgctttgggtactcctcctctgggtccccggaagtacaggcgataacttgactacccgcacacagctcccgccggcgtacactaactccttcacccggggggtttactacccggacaaagtgttccgcagcagtgtcctgcattcaacacaagatttgttccttccattctttagcaatgtcacttggttccatgctatacacgtgagtggcactaacggcactaagcgcttcgataacccggttctgccgtttaatgatggcgtttacttcgcaagtactgagaaatcaaacattatacgggggtggatattcggtactacattggatagtaaaactcaaagccttttgattgtcaacaatgcaactaatgtagtcataaaagtttgtgaattccaattctgtaacgatccctttcttggtgtgtattaccacaagaataacaaatcatggatggagtctgaatttcgagtatacagtagcgccaataattgcacgtttgagtatgtaagccagccgtttctgatggacttggaaggaaagcaaggcaactttaagaacctcagggagttcgtattcaaaaatatagacggttacttcaagatttactcaaaacatacacctatcaacttggtccgagatctcccacaaggtttttcagcgctcgagccattggtggacctgcccatcggaatcaacattacccgattccagacactgcttgcactgcaccggagttatctcacacccggcgacagctcgtctggttggacggcgggagctgccgcttactatgtcggttacttgcaacctcggacatttcttctgaagtataacgaaaacggtacgatcaccgatgccgtagactgcgctctcgatcccctttcagagacgaagtgcacgctcaaatcatttactgtggaaaaaggaatttatcaaacgagcaatttcagggtgcaacccacggagtccatcgtacgattcccaaacataacaaatctttgcccgtttggcgaggtttttaatgctacgcgctttgcatcagtgtacgcttggaataggaaacgaatctcaaattgtgttgcggattattccgtgttgtataattccgcaagcttctccacctttaaatgttatggcgtgtcccccacaaaacttaacgatctttgctttacaaatgtctatgcggattcattcgttatccgaggggatgaagtgcgacaaatcgctcctgggcagacagggaagatagctgattacaattacaaacttccagacgattttacaggatgtgtaatcgcgtggaactcaaacaatttggacagtaaggttggtggcaactacaattatctgtatagacttttcagaaaaagtaacctcaaacctttcgaacgcgacattagcactgagatataccaggccggatcaactccttgtaacggtgttgaaggtttcaactgttactttccgctccaatcctacggctttcaaccaacgaacggtgtcgggtaccaaccatacagagttgtcgtcttgagttttgagcttttgcacgcacctgcaaccgtgtgtggtccgaagaaaagtactaatctggttaaaaataaatgcgtcaatttcaactttaatgggttgacgggcacaggcgtgctgacagagtccaataaaaagtttttgccctttcagcagtttgggagggacatcgccgatacgaccgatgccgtccgagatcctcaaacccttgaaatattggacattaccccctgtagttttggcggtgtaagtgtgattactcccggaacgaatacatctaaccaggtagcggtgctttatcaagatgtcaactgtacagaggtccccgtggcgattcacgccgatcagttgacacccacatggagggtttacagcacaggatccaacgtcttccagacgagagcaggatgcttgatcggtgccgagcatgtgaataacagctacgaatgtgacattccgattggtgctggaatctgcgcaagttaccaaactcaaacgaattcccctggctccgcctcctctgtggcatcccagtctataatcgcgtatacgatgtcactgggcgccgagaattctgtcgcatatagcaacaactccatcgcaatacccacaaattttacaatttctgtgaccacggaaattctgcccgtcagcatgacaaaaactagcgtggactgcacgatgtatatctgcggcgactccacagagtgttccaacctcctcttgcaatatggcagcttttgcacacaattgaaccgagcgctcaccgggatagcggtcgagcaagataagaatacccaagaggtgtttgcccaggtgaagcaaatctataagacccctccaataaaggattttggcggcttcaatttctcacaaattttgcccgatccatctaagccgtccaagcgatcatttattgaggatctgctgttcaacaaagtcactctcgccgacgcggggtttattaaacaatatggcgattgcctgggcgacatcgccgccagggaccttatatgcgcccagaagttcaacggtctcaccgtgctgccaccattgttgactgacgaaatgatcgcacagtatacgtcagcgctgctggctggtaccattacttctggctggacattcggagccggtgcagcccttcagattccatttgcaatgcagatggcctatagatttaatggaataggagtgacgcagaacgtattgtacgagaatcaaaagttgatcgcaaaccagttcaattctgccattggaaagatacaagattccctttcttctaccgcctcagccctgggtaagttgcaagatgtcgtcaaccaaaatgcacaggctttgaataccttggtaaaacaattgtcatccaatttcggcgccataagctcagtacttaacgatatcttgtcacgattggatccccccgaagccgaggtccaaatcgataggctcatcacgggacggctccagagccttcaaacctatgtgacgcaacaactgatacgggccgcagaaatccgagcgtccgccaacttggcagctaccaagatgtccgaatgtgtactgggtcaatcaaagagagttgatttctgtggaaaaggataccatctcatgtcattcccccaaagcgccccgcacggcgtcgtgttcctccatgtgacttacgttccagcacaagaaaaaaacttcacaactgcgcccgctatctgccatgacgggaaggcgcacttcccacgagagggtgtatttgtgtcaaatggaacgcactggttcgtaacgcaaaggaacttctatgaaccgcagataatcacgactgacaacacttttgtatctggcaattgtgatgtggtcatcgggatagttaacaacactgtctatgacccgctgcaacccgagcttgattcatttaaagaagaactcgataaatatttcaagaatcacaccagtcccgatgtggaccttggagacatttccgggataaatgcctctgtggtaaacatccaaaaggaaatcgatcggctgaatgaagtggccaaaaacttgaacgaaagtctgatagaccttcaggagctcgggaagtatgaacaagggagcggttatattcctgaagctccaagagatgggcaagcttacgttcgtaaagatggcgaatgggtacttctttctacctttttatgatga

SEQ ID NO: 92 - DNA, 3726 bp, Artificial Sequence
  Description of Artificial Sequence: Synthetic polynucleotide
  pKL066
atggaaactgatacactgttgctttgggtactcctcctctgggtccccggaagtacaggcgatactacccgcacacagctcccgccggcgtacactaactccttcacccggggggtttactacccggacaaagtgttccgcagcagtgtcctgcattcaacacaagatttgttccttccattctttagcaatgtcacttggttccatgctatacacgtgagtggcactaacggcactaagcgcttcgataacccggttctgccgtttaatgatggcgtttacttcgcaagtactgagaaatcaaacattatacgggggtggatattcggtactacattggatagtaaaactcaaagccttttgattgtcaacaatgcaactaatgtagtcataaaagtttgtgaattccaattctgtaacgatccctttcttggtgtgtattaccacaagaataacaaatcatggatggagtctgaatttcgagtatacagtagcgccaataattgcacgtttgagtatgtaagccagccgtttctgatggacttggaaggaaagcaaggcaactttaagaacctcagggagttcgtattcaaaaatatagacggttacttcaagatttactcaaaacatacacctatcaacttggtccgagatctcccacaaggtttttcagcgctcgagccattggtggacctgcccatcggaatcaacattacccgattccagacactgcttgcactgcaccggagttatctcacacccggcgacagctcgtctggttggacggcgggagctgccgcttactatgtcggttacttgcaacctcggacatttcttctgaagtataacgaaaacggtacgatcaccgatgccgtagactgcgctctcgatcccctttcagagacgaagtgcacgctcaaatcatttactgtggaaaaaggaatttatcaaacgagcaatttcagggtgcaacccacggagtccatcgtacgattcccaaacataacaaatctttgcccgtttggcgaggtttttaatgctacgcgctttgcatcagtgtacgcttggaataggaaacgaatctcaaattgtgttgcggattattccgtgttgtataattccgcaagcttctccacctttaaatgttatggcgtgtcccccacaaaacttaacgatctttgctttacaaatgtctatgcggattcattcgttatccgaggggatgaagtgcgacaaatcgctcctgggcagacagggaagatagctgattacaattacaaacttccagacgattttacaggatgtgtaatcgcgtggaactcaaacaatttggacagtaaggttggtggcaactacaattatctgtatagacttttcagaaaaagtaacctcaaacctttcgaacgcgacattagcactgagatataccaggccggatcaactccttgtaacggtgttgaaggtttcaactgttactttccgctccaatcctacggctttcaaccaacgaacggtgtcgggtaccaaccatacagagttgtcgtcttgagttttgagcttttgcacgcacctgcaaccgtgtgtggtccgaagaaaagtactaatctggttaaaaataaatgcgtcaatttcaactttaatgggttgacgggcacaggcgtgctgacagagtccaataaaaagtttttgccctttcagcagtttgggagggacatcgccgatacgaccgatgccgtccgagatcctcaaacccttgaaatattggacattaccccctgtagttttggcggtgtaagtgtgattactcccggaacgaatacatctaaccaggtagcggtgctttatcaagatgtcaactgtacagaggtccccgtggcgattcacgccgatcagttgacacccacatggagggtttacagcacaggatccaacgtcttccagacgagagcaggatgcttgatcggtgccgagcatgtgaataacagctacgaatgtgacattccgattggtgctggaatctgcgcaagttaccaaactcaaacgaattcccctggctccgcctcctctgtggcatcccagtctataatcgcgtatacgatgtcactgggcgccgagaattctgtcgcatatagcaacaactccatcgcaatacccacaaattttacaatttctgtgaccacggaaattctgcccgtcagcatgacaaaaactagcgtggactgcacgatgtatatctgcggcgactccacagagtgttccaacctcctcttgcaatatggcagcttttgcacacaattgaaccgagcgctcaccgggatagcggtcgagcaagataagaatacccaagaggtgtttgcccaggtgaagcaaatctataagacccctccaataaaggattttggcggcttcaatttctcacaaattttgcccgatccatctaagccgtccaagcgatcatttattgaggatctgctgttcaacaaagtcactctcgccgacgcggggtttattaaacaatatggcgattgcctgggcgacatcgccgccagggaccttatatgcgcccagaagttcaacggtctcaccgtgctgccaccattgttgactgacgaaatgatcgcacagtatacgtcagcgctgctggctggtaccattacttctggctggacattcggagccggtgcagcccttcagattccatttgcaatgcagatggcctatagatttaatggaataggagtgacgcagaacgtattgtacgagaatcaaaagttgatcgcaaaccagttcaattctgccattggaaagatacaagattccctttcttctaccgcctcagccctgggtaagttgcaagatgtcgtcaaccaaaatgcacaggctttgaataccttggtaaaacaattgtcatccaatttcggcgccataagctcagtacttaacgatatcttgtcacgattggatccccccgaagccgaggtccaaatcgataggctcatcacgggacggctccagagccttcaaacctatgtgacgcaacaactgatacgggccgcagaaatccgagcgtccgccaacttggcagctaccaagatgtccgaatgtgtactgggtcaatcaaagagagttgatttctgtggaaaaggataccatctcatgtcattcccccaaagcgccccgcacggcgtcgtgttcctccatgtgacttacgttccagcacaagaaaaaaacttcacaactgcgcccgctatctgccatgacgggaaggcgcacttcccacgagagggtgtatttgtgtcaaatggaacgcactggttcgtaacgcaaaggaacttctatgaaccgcagataatcacgactgacaacacttttgtatctggcaattgtgatgtggtcatcgggatagttaacaacactgtctatgacccgctgcaacccgagcttgattcatttaaagaagaactcgataaatatttcaagaatcacaccagtcccgatgtggaccttggagacatttccgggataaatgcctctgtggtaaacatccaaaaggaaatcgatcggctgaatgaagtggccaaaaacttgaacgaaagtctgatagaccttcaggagctcgggaagtatgaacaagggagcggttatattcctgaagctccaagagatgggcaagcttacgttcgtaaagatggcgaatgggtacttctttctacctttttatgatga

SEQ ID NO: 93 - DNA, 3732 bp, Artificial Sequence
  Description of Artificial Sequence: Synthetic polynucleotide
  pKL067
atgaggccgactctgctttggagtctgttgttgcttttgggtgtatttgctgcggcagcagccaacttgactacccgcacacagctcccgccggcgtacactaactccttcacccggggggtttactacccggacaaagtgttccgcagcagtgtcctgcattcaacacaagatttgttccttccattctttagcaatgtcacttggttccatgctatacacgtgagtggcactaacggcactaagcgcttcgataacccggttctgccgtttaatgatggcgtttacttcgcaagtactgagaaatcaaacattatacgggggtggatattcggtactacattggatagtaaaactcaaagccttttgattgtcaacaatgcaactaatgtagtcataaaagtttgtgaattccaattctgtaacgatccctttcttggtgtgtattaccacaagaataacaaatcatggatggagtctgaatttcgagtatacagtagcgccaataattgcacgtttgagtatgtaagccagccgtttctgatggacttggaaggaaagcaaggcaactttaagaacctcagggagttcgtattcaaaaatatagacggttacttcaagatttactcaaaacatacacctatcaacttggtccgagatctcccacaaggtttttcagcgctcgagccattggtggacctgcccatcggaatcaacattacccgattccagacactgcttgcactgcaccggagttatctcacacccggcgacagctcgtctggttggacggcgggagctgccgcttactatgtcggttacttgcaacctcggacatttcttctgaagtataacgaaaacggtacgatcaccgatgccgtagactgcgctctcgatcccctttcagagacgaagtgcacgctcaaatcatttactgtggaaaaaggaatttatcaaacgagcaatttcagggtgcaacccacggagtccatcgtacgattcccaaacataacaaatctttgcccgtttggcgaggtttttaatgctacgcgctttgcatcagtgtacgcttggaataggaaacgaatctcaaattgtgttgcggattattccgtgttgtataattccgcaagcttctccacctttaaatgttatggcgtgtcccccacaaaacttaacgatctttgctttacaaatgtctatgcggattcattcgttatccgaggggatgaagtgcgacaaatcgctcctgggcagacagggaagatagctgattacaattacaaacttccagacgattttacaggatgtgtaatcgcgtggaactcaaacaatttggacagtaaggttggtggcaactacaattatctgtatagacttttcagaaaaagtaacctcaaacctttcgaacgcgacattagcactgagatataccaggccggatcaactccttgtaacggtgttgaaggtttcaactgttactttccgctccaatcctacggctttcaaccaacgaacggtgtcgggtaccaaccatacagagttgtcgtcttgagttttgagcttttgcacgcacctgcaaccgtgtgtggtccgaagaaaagtactaatctggttaaaaataaatgcgtcaatttcaactttaatgggttgacgggcacaggcgtgctgacagagtccaataaaaagtttttgccctttcagcagtttgggagggacatcgccgatacgaccgatgccgtccgagatcctcaaacccttgaaatattggacattaccccctgtagttttggcggtgtaagtgtgattactcccggaacgaatacatctaaccaggtagcggtgctttatcaagatgtcaactgtacagaggtccccgtggcgattcacgccgatcagttgacacccacatggagggtttacagcacaggatccaacgtcttccagacgagagcaggatgcttgatcggtgccgagcatgtgaataacagctacgaatgtgacattccgattggtgctggaatctgcgcaagttaccaaactcaaacgaattcccctggctccgcctcctctgtggcatcccagtctataatcgcgtatacgatgtcactgggcgccgagaattctgtcgcatatagcaacaactccatcgcaatacccacaaattttacaatttctgtgaccacggaaattctgcccgtcagcatgacaaaaactagcgtggactgcacgatgtatatctgcggcgactccacagagtgttccaacctcctcttgcaatatggcagcttttgcacacaattgaaccgagcgctcaccgggatagcggtcgagcaagataagaatacccaagaggtgtttgcccaggtgaagcaaatctataagacccctccaataaaggattttggcggcttcaatttctcacaaattttgcccgatccatctaagccgtccaagcgatcatttattgaggatctgctgttcaacaaagtcactctcgccgacgcggggtttattaaacaatatggcgattgcctgggcgacatcgccgccagggaccttatatgcgcccagaagttcaacggtctcaccgtgctgccaccattgttgactgacgaaatgatcgcacagtatacgtcagcgctgctggctggtaccattacttctggctggacattcggagccggtgcagcccttcagattccatttgcaatgcagatggcctatagatttaatggaataggagtgacgcagaacgtattgtacgagaatcaaaagttgatcgcaaaccagttcaattctgccattggaaagatacaagattccctttcttctaccgcctcagccctgggtaagttgcaagatgtcgtcaaccaaaatgcacaggctttgaataccttggtaaaacaattgtcatccaatttcggcgccataagctcagtacttaacgatatcttgtcacgattggatccccccgaagccgaggtccaaatcgataggctcatcacgggacggctccagagccttcaaacctatgtgacgcaacaactgatacgggccgcagaaatccgagcgtccgccaacttggcagctaccaagatgtccgaatgtgtactgggtcaatcaaagagagttgatttctgtggaaaaggataccatctcatgtcattcccccaaagcgccccgcacggcgtcgtgttcctccatgtgacttacgttccagcacaagaaaaaaacttcacaactgcgcccgctatctgccatgacgggaaggcgcacttcccacgagagggtgtatttgtgtcaaatggaacgcactggttcgtaacgcaaaggaacttctatgaaccgcagataatcacgactgacaacacttttgtatctggcaattgtgatgtggtcatcgggatagttaacaacactgtctatgacccgctgcaacccgagcttgattcatttaaagaagaactcgataaatatttcaagaatcacaccagtcccgatgtggaccttggagacatttccgggataaatgcctctgtggtaaacatccaaaaggaaatcgatcggctgaatgaagtggccaaaaacttgaacgaaagtctgatagaccttcaggagctcgggaagtatgaacaagggagcggttatattcctgaagctccaagagatgggcaagcttacgttcgtaaagatggcgaatgggtacttctttctacctttttatgatga

SEQ ID NO: 94 - DNA, 3726 bp, Artificial Sequence
  Description of Artificial Sequence: Synthetic polynucleotide
  pKL068
atgaggccgactctgctttggagtctgttgttgcttttgggtgtatttgctgcggcagcagccactacccgcacacagctcccgccggcgtacactaactccttcacccggggggtttactacccggacaaagtgttccgcagcagtgtcctgcattcaacacaagatttgttccttccattctttagcaatgtcacttggttccatgctatacacgtgagtggcactaacggcactaagcgcttcgataacccggttctgccgtttaatgatggcgtttacttcgcaagtactgagaaatcaaacattatacgggggtggatattcggtactacattggatagtaaaactcaaagccttttgattgtcaacaatgcaactaatgtagtcataaaagtttgtgaattccaattctgtaacgatccctttcttggtgtgtattaccacaagaataacaaatcatggatggagtctgaatttcgagtatacagtagcgccaataattgcacgtttgagtatgtaagccagccgtttctgatggacttggaaggaaagcaaggcaactttaagaacctcagggagttcgtattcaaaaatatagacggttacttcaagatttactcaaaacatacacctatcaacttggtccgagatctcccacaaggtttttcagcgctcgagccattggtggacctgcccatcggaatcaacattacccgattccagacactgcttgcactgcaccggagttatctcacacccggcgacagctcgtctggttggacggcgggagctgccgcttactatgtcggttacttgcaacctcggacatttcttctgaagtataacgaaaacggtacgatcaccgatgccgtagactgcgctctcgatcccctttcagagacgaagtgcacgctcaaatcatttactgtggaaaaaggaatttatcaaacgagcaatttcagggtgcaacccacggagtccatcgtacgattcccaaacataacaaatctttgcccgtttggcgaggtttttaatgctacgcgctttgcatcagtgtacgcttggaataggaaacgaatctcaaattgtgttgcggattattccgtgttgtataattccgcaagcttctccacctttaaatgttatggcgtgtcccccacaaaacttaacgatctttgctttacaaatgtctatgcggattcattcgttatccgaggggatgaagtgcgacaaatcgctcctgggcagacagggaagatagctgattacaattacaaacttccagacgattttacaggatgtgtaatcgcgtggaactcaaacaatttggacagtaaggttggtggcaactacaattatctgtatagacttttcagaaaaagtaacctcaaacctttcgaacgcgacattagcactgagatataccaggccggatcaactccttgtaacggtgttgaaggtttcaactgttactttccgctccaatcctacggctttcaaccaacgaacggtgtcgggtaccaaccatacagagttgtcgtcttgagttttgagcttttgcacgcacctgcaaccgtgtgtggtccgaagaaaagtactaatctggttaaaaataaatgcgtcaatttcaactttaatgggttgacgggcacaggcgtgctgacagagtccaataaaaagtttttgccctttcagcagtttgggagggacatcgccgatacgaccgatgccgtccgagatcctcaaacccttgaaatattggacattaccccctgtagttttggcggtgtaagtgtgattactcccggaacgaatacatctaaccaggtagcggtgctttatcaagatgtcaactgtacagaggtccccgtggcgattcacgccgatcagttgacacccacatggagggtttacagcacaggatccaacgtcttccagacgagagcaggatgcttgatcggtgccgagcatgtgaataacagctacgaatgtgacattccgattggtgctggaatctgcgcaagttaccaaactcaaacgaattcccctggctccgcctcctctgtggcatcccagtctataatcgcgtatacgatgtcactgggcgccgagaattctgtcgcatatagcaacaactccatcgcaatacccacaaattttacaatttctgtgaccacggaaattctgcccgtcagcatgacaaaaactagcgtggactgcacgatgtatatctgcggcgactccacagagtgttccaacctcctcttgcaatatggcagcttttgcacacaattgaaccgagcgctcaccgggatagcggtcgagcaagataagaatacccaagaggtgtttgcccaggtgaagcaaatctataagacccctccaataaaggattttggcggcttcaatttctcacaaattttgcccgatccatctaagccgtccaagcgatcatttattgaggatctgctgttcaacaaagtcactctcgccgacgcggggtttattaaacaatatggcgattgcctgggcgacatcgccgccagggaccttatatgcgcccagaagttcaacggtctcaccgtgctgccaccattgttgactgacgaaatgatcgcacagtatacgtcagcgctgctggctggtaccattacttctggctggacattcggagccggtgcagcccttcagattccatttgcaatgcagatggcctatagatttaatggaataggagtgacgcagaacgtattgtacgagaatcaaaagttgatcgcaaaccagttcaattctgccattggaaagatacaagattccctttcttctaccgcctcagccctgggtaagttgcaagatgtcgtcaaccaaaatgcacaggctttgaataccttggtaaaacaattgtcatccaatttcggcgccataagctcagtacttaacgatatcttgtcacgattggatccccccgaagccgaggtccaaatcgataggctcatcacgggacggctccagagccttcaaacctatgtgacgcaacaactgatacgggccgcagaaatccgagcgtccgccaacttggcagctaccaagatgtccgaatgtgtactgggtcaatcaaagagagttgatttctgtggaaaaggataccatctcatgtcattcccccaaagcgccccgcacggcgtcgtgttcctccatgtgacttacgttccagcacaagaaaaaaacttcacaactgcgcccgctatctgccatgacgggaaggcgcacttcccacgagagggtgtatttgtgtcaaatggaacgcactggttcgtaacgcaaaggaacttctatgaaccgcagataatcacgactgacaacacttttgtatctggcaattgtgatgtggtcatcgggatagttaacaacactgtctatgacccgctgcaacccgagcttgattcatttaaagaagaactcgataaatatttcaagaatcacaccagtcccgatgtggaccttggagacatttccgggataaatgcctctgtggtaaacatccaaaaggaaatcgatcggctgaatgaagtggccaaaaacttgaacgaaagtctgatagaccttcaggagctcgggaagtatgaacaagggagcggttatattcctgaagctccaagagatgggcaagcttacgttcgtaaagatggcgaatgggtacttctttctacctttttatgatga

SEQ ID NO: 95 - DNA, 3726 bp, Artificial Sequence
  Description of Artificial Sequence: Synthetic polynucleotide
  pKL069
atgggtgttaaagtgttgtttgctttgatttgcattgcagtcgctgaagcaaaaccgaacttgactacccgcacacagctcccgccggcgtacactaactccttcacccggggggtttactacccggacaaagtgttccgcagcagtgtcctgcattcaacacaagatttgttccttccattctttagcaatgtcacttggttccatgctatacacgtgagtggcactaacggcactaagcgcttcgataacccggttctgccgtttaatgatggcgtttacttcgcaagtactgagaaatcaaacattatacgggggtggatattcggtactacattggatagtaaaactcaaagccttttgattgtcaacaatgcaactaatgtagtcataaaagtttgtgaattccaattctgtaacgatccctttcttggtgtgtattaccacaagaataacaaatcatggatggagtctgaatttcgagtatacagtagcgccaataattgcacgtttgagtatgtaagccagccgtttctgatggacttggaaggaaagcaaggcaactttaagaacctcagggagttcgtattcaaaaatatagacggttacttcaagatttactcaaaacatacacctatcaacttggtccgagatctcccacaaggtttttcagcgctcgagccattggtggacctgcccatcggaatcaacattacccgattccagacactgcttgcactgcaccggagttatctcacacccggcgacagctcgtctggttggacggcgggagctgccgcttactatgtcggttacttgcaacctcggacatttcttctgaagtataacgaaaacggtacgatcaccgatgccgtagactgcgctctcgatcccctttcagagacgaagtgcacgctcaaatcatttactgtggaaaaaggaatttatcaaacgagcaatttcagggtgcaacccacggagtccatcgtacgattcccaaacataacaaatctttgcccgtttggcgaggtttttaatgctacgcgctttgcatcagtgtacgcttggaataggaaacgaatctcaaattgtgttgcggattattccgtgttgtataattccgcaagcttctccacctttaaatgttatggcgtgtcccccacaaaacttaacgatctttgctttacaaatgtctatgcggattcattcgttatccgaggggatgaagtgcgacaaatcgctcctgggcagacagggaagatagctgattacaattacaaacttccagacgattttacaggatgtgtaatcgcgtggaactcaaacaatttggacagtaaggttggtggcaactacaattatctgtatagacttttcagaaaaagtaacctcaaacctttcgaacgcgacattagcactgagatataccaggccggatcaactccttgtaacggtgttgaaggtttcaactgttactttccgctccaatcctacggctttcaaccaacgaacggtgtcgggtaccaaccatacagagttgtcgtcttgagttttgagcttttgcacgcacctgcaaccgtgtgtggtccgaagaaaagtactaatctggttaaaaataaatgcgtcaatttcaactttaatgggttgacgggcacaggcgtgctgacagagtccaataaaaagtttttgccctttcagcagtttgggagggacatcgccgatacgaccgatgccgtccgagatcctcaaacccttgaaatattggacattaccccctgtagttttggcggtgtaagtgtgattactcccggaacgaatacatctaaccaggtagcggtgctttatcaagatgtcaactgtacagaggtccccgtggcgattcacgccgatcagttgacacccacatggagggtttacagcacaggatccaacgtcttccagacgagagcaggatgcttgatcggtgccgagcatgtgaataacagctacgaatgtgacattccgattggtgctggaatctgcgcaagttaccaaactcaaacgaattcccctggctccgcctcctctgtggcatcccagtctataatcgcgtatacgatgtcactgggcgccgagaattctgtcgcatatagcaacaactccatcgcaatacccacaaattttacaatttctgtgaccacggaaattctgcccgtcagcatgacaaaaactagcgtggactgcacgatgtatatctgcggcgactccacagagtgttccaacctcctcttgcaatatggcagcttttgcacacaattgaaccgagcgctcaccgggatagcggtcgagcaagataagaatacccaagaggtgtttgcccaggtgaagcaaatctataagacccctccaataaaggattttggcggcttcaatttctcacaaattttgcccgatccatctaagccgtccaagcgatcatttattgaggatctgctgttcaacaaagtcactctcgccgacgcggggtttattaaacaatatggcgattgcctgggcgacatcgccgccagggaccttatatgcgcccagaagttcaacggtctcaccgtgctgccaccattgttgactgacgaaatgatcgcacagtatacgtcagcgctgctggctggtaccattacttctggctggacattcggagccggtgcagcccttcagattccatttgcaatgcagatggcctatagatttaatggaataggagtgacgcagaacgtattgtacgagaatcaaaagttgatcgcaaaccagttcaattctgccattggaaagatacaagattccctttcttctaccgcctcagccctgggtaagttgcaagatgtcgtcaaccaaaatgcacaggctttgaataccttggtaaaacaattgtcatccaatttcggcgccataagctcagtacttaacgatatcttgtcacgattggatccccccgaagccgaggtccaaatcgataggctcatcacgggacggctccagagccttcaaacctatgtgacgcaacaactgatacgggccgcagaaatccgagcgtccgccaacttggcagctaccaagatgtccgaatgtgtactgggtcaatcaaagagagttgatttctgtggaaaaggataccatctcatgtcattcccccaaagcgccccgcacggcgtcgtgttcctccatgtgacttacgttccagcacaagaaaaaaacttcacaactgcgcccgctatctgccatgacgggaaggcgcacttcccacgagagggtgtatttgtgtcaaatggaacgcactggttcgtaacgcaaaggaacttctatgaaccgcagataatcacgactgacaacacttttgtatctggcaattgtgatgtggtcatcgggatagttaacaacactgtctatgacccgctgcaacccgagcttgattcatttaaagaagaactcgataaatatttcaagaatcacaccagtcccgatgtggaccttggagacatttccgggataaatgcctctgtggtaaacatccaaaaggaaatcgatcggctgaatgaagtggccaaaaacttgaacgaaagtctgatagaccttcaggagctcgggaagtatgaacaagggagcggttatattcctgaagctccaagagatgggcaagcttacgttcgtaaagatggcgaatgggtacttctttctacctttttatgatga

SEQ ID NO: 96 - DNA, 3720 bp, Artificial Sequence
  Description of Artificial Sequence: Synthetic polynucleotide
  pKL070
atgggtgttaaagtgttgtttgctttgatttgcattgcagtcgctgaagcaaaaccgactacccgcacacagctcccgccggcgtacactaactccttcacccggggggtttactacccggacaaagtgttccgcagcagtgtcctgcattcaacacaagatttgttccttccattctttagcaatgtcacttggttccatgctatacacgtgagtggcactaacggcactaagcgcttcgataacccggttctgccgtttaatgatggcgtttacttcgcaagtactgagaaatcaaacattatacgggggtggatattcggtactacattggatagtaaaactcaaagccttttgattgtcaacaatgcaactaatgtagtcataaaagtttgtgaattccaattctgtaacgatccctttcttggtgtgtattaccacaagaataacaaatcatggatggagtctgaatttcgagtatacagtagcgccaataattgcacgtttgagtatgtaagccagccgtttctgatggacttggaaggaaagcaaggcaactttaagaacctcagggagttcgtattcaaaaatatagacggttacttcaagatttactcaaaacatacacctatcaacttggtccgagatctcccacaaggtttttcagcgctcgagccattggtggacctgcccatcggaatcaacattacccgattccagacactgcttgcactgcaccggagttatctcacacccggcgacagctcgtctggttggacggcgggagctgccgcttactatgtcggttacttgcaacctcggacatttcttctgaagtataacgaaaacggtacgatcaccgatgccgtagactgcgctctcgatcccctttcagagacgaagtgcacgctcaaatcatttactgtggaaaaaggaatttatcaaacgagcaatttcagggtgcaacccacggagtccatcgtacgattcccaaacataacaaatctttgcccgtttggcgaggtttttaatgctacgcgctttgcatcagtgtacgcttggaataggaaacgaatctcaaattgtgttgcggattattccgtgttgtataattccgcaagcttctccacctttaaatgttatggcgtgtcccccacaaaacttaacgatctttgctttacaaatgtctatgcggattcattcgttatccgaggggatgaagtgcgacaaatcgctcctgggcagacagggaagatagctgattacaattacaaacttccagacgattttacaggatgtgtaatcgcgtggaactcaaacaatttggacagtaaggttggtggcaactacaattatctgtatagacttttcagaaaaagtaacctcaaacctttcgaacgcgacattagcactgagatataccaggccggatcaactccttgtaacggtgttgaaggtttcaactgttactttccgctccaatcctacggctttcaaccaacgaacggtgtcgggtaccaaccatacagagttgtcgtcttgagttttgagcttttgcacgcacctgcaaccgtgtgtggtccgaagaaaagtactaatctggttaaaaataaatgcgtcaatttcaactttaatgggttgacgggcacaggcgtgctgacagagtccaataaaaagtttttgccctttcagcagtttgggagggacatcgccgatacgaccgatgccgtccgagatcctcaaacccttgaaatattggacattaccccctgtagttttggcggtgtaagtgtgattactcccggaacgaatacatctaaccaggtagcggtgctttatcaagatgtcaactgtacagaggtccccgtggcgattcacgccgatcagttgacacccacatggagggtttacagcacaggatccaacgtcttccagacgagagcaggatgcttgatcggtgccgagcatgtgaataacagctacgaatgtgacattccgattggtgctggaatctgcgcaagttaccaaactcaaacgaattcccctggctccgcctcctctgtggcatcccagtctataatcgcgtatacgatgtcactgggcgccgagaattctgtcgcatatagcaacaactccatcgcaatacccacaaattttacaatttctgtgaccacggaaattctgcccgtcagcatgacaaaaactagcgtggactgcacgatgtatatctgcggcgactccacagagtgttccaacctcctcttgcaatatggcagcttttgcacacaattgaaccgagcgctcaccgggatagcggtcgagcaagataagaatacccaagaggtgtttgcccaggtgaagcaaatctataagacccctccaataaaggattttggcggcttcaatttctcacaaattttgcccgatccatctaagccgtccaagcgatcatttattgaggatctgctgttcaacaaagtcactctcgccgacgcggggtttattaaacaatatggcgattgcctgggcgacatcgccgccagggaccttatatgcgcccagaagttcaacggtctcaccgtgctgccaccattgttgactgacgaaatgatcgcacagtatacgtcagcgctgctggctggtaccattacttctggctggacattcggagccggtgcagcccttcagattccatttgcaatgcagatggcctatagatttaatggaataggagtgacgcagaacgtattgtacgagaatcaaaagttgatcgcaaaccagttcaattctgccattggaaagatacaagattccctttcttctaccgcctcagccctgggtaagttgcaagatgtcgtcaaccaaaatgcacaggctttgaataccttggtaaaacaattgtcatccaatttcggcgccataagctcagtacttaacgatatcttgtcacgattggatccccccgaagccgaggtccaaatcgataggctcatcacgggacggctccagagccttcaaacctatgtgacgcaacaactgatacgggccgcagaaatccgagcgtccgccaacttggcagctaccaagatgtccgaatgtgtactgggtcaatcaaagagagttgatttctgtggaaaaggataccatctcatgtcattcccccaaagcgccccgcacggcgtcgtgttcctccatgtgacttacgttccagcacaagaaaaaaacttcacaactgcgcccgctatctgccatgacgggaaggcgcacttcccacgagagggtgtatttgtgtcaaatggaacgcactggttcgtaacgcaaaggaacttctatgaaccgcagataatcacgactgacaacacttttgtatctggcaattgtgatgtggtcatcgggatagttaacaacactgtctatgacccgctgcaacccgagcttgattcatttaaagaagaactcgataaatatttcaagaatcacaccagtcccgatgtggaccttggagacatttccgggataaatgcctctgtggtaaacatccaaaaggaaatcgatcggctgaatgaagtggccaaaaacttgaacgaaagtctgatagaccttcaggagctcgggaagtatgaacaagggagcggttatattcctgaagctccaagagatgggcaagcttacgttcgtaaagatggcgaatgggtacttctttctacctttttatgatga

SEQ ID NO: 97 - DNA, 3828 bp, Artificial Sequence
  Description of Artificial Sequence: Synthetic polynucleotide
  pJW019
atgtttgtttttcttgttcttctgccattggtgtcttcccaatgtgtgaacttgactacccgcacacagctcccgccggcgtacactaactccttcacccggggggtttactacccggacaaagtgttccgcagcagtgtcctgcattcaacacaagatttgttccttccattctttagcaatgtcacttggttccatgctatacacgtgagtggcactaacggcactaagcgcttcgataacccggttctgccgtttaatgatggcgtttacttcgcaagtactgagaaatcaaacattatacgggggtggatattcggtactacattggatagtaaaactcaaagccttttgattgtcaacaatgcaactaatgtagtcataaaagtttgtgaattccaattctgtaacgatccctttcttggtgtgtattaccacaagaataacaaatcatggatggagtctgaatttcgagtatacagtagcgccaataattgcacgtttgagtatgtaagccagccgtttctgatggacttggaaggaaagcaaggcaactttaagaacctcagggagttcgtattcaaaaatatagacggttacttcaagatttactcaaaacatacacctatcaacttggtccgagatctcccacaaggtttttcagcgctcgagccattggtggacctgcccatcggaatcaacattacccgattccagacactgcttgcactgcaccggagttatctcacacccggcgacagctcgtctggttggacggcgggagctgccgcttactatgtcggttacttgcaacctcggacatttcttctgaagtataacgaaaacggtacgatcaccgatgccgtagactgcgctctcgatcccctttcagagacgaagtgcacgctcaaatcatttactgtggaaaaaggaatttatcaaacgagcaatttcagggtgcaacccacggagtccatcgtacgattcccaaacataacaaatctttgcccgtttggcgaggtttttaatgctacgcgctttgcatcagtgtacgcttggaataggaaacgaatctcaaattgtgttgcggattattccgtgttgtataattccgcaagcttctccacctttaaatgttatggcgtgtcccccacaaaacttaacgatctttgctttacaaatgtctatgcggattcattcgttatccgaggggatgaagtgcgacaaatcgctcctgggcagacagggaagatagctgattacaattacaaacttccagacgattttacaggatgtgtaatcgcgtggaactcaaacaatttggacagtaaggttggtggcaactacaattatctgtatagacttttcagaaaaagtaacctcaaacctttcgaacgcgacattagcactgagatataccaggccggatcaactccttgtaacggtgttgaaggtttcaactgttactttccgctccaatcctacggctttcaaccaacgaacggtgtcgggtaccaaccatacagagttgtcgtcttgagttttgagcttttgcacgcacctgcaaccgtgtgtggtccgaagaaaagtactaatctggttaaaaataaatgcgtcaatttcaactttaatgggttgacgggcacaggcgtgctgacagagtccaataaaaagtttttgccctttcagcagtttgggagggacatcgccgatacgaccgatgccgtccgagatcctcaaacccttgaaatattggacattaccccctgtagttttggcggtgtaagtgtgattactcccggaacgaatacatctaaccaggtagcggtgctttatcaagatgtcaactgtacagaggtccccgtggcgattcacgccgatcagttgacacccacatggagggtttacagcacaggatccaacgtcttccagacgagagcaggatgcttgatcggtgccgagcatgtgaataacagctacgaatgtgacattccgattggtgctggaatctgcgcaagttaccaaactcaaacgaattcccctggctccgcctcctctgtggcatcccagtctataatcgcgtatacgatgtcactgggcgccgagaattctgtcgcatatagcaacaactccatcgcaatacccacaaattttacaatttctgtgaccacggaaattctgcccgtcagcatgacaaaaactagcgtggactgcacgatgtatatctgcggcgactccacagagtgttccaacctcctcttgcaatatggcagcttttgcacacaattgaaccgagcgctcaccgggatagcggtcgagcaagataagaatacccaagaggtgtttgcccaggtgaagcaaatctataagacccctccaataaaggattttggcggcttcaatttctcacaaattttgcccgatccatctaagccgtccaagcgatcatttattgaggatctgctgttcaacaaagtcactctcgccgacgcggggtttattaaacaatatggcgattgcctgggcgacatcgccgccagggaccttatatgcgcccagaagttcaacggtctcaccgtgctgccaccattgttgactgacgaaatgatcgcacagtatacgtcagcgctgctggctggtaccattacttctggctggacattcggagccggtgcagcccttcagattccatttgcaatgcagatggcctatagatttaatggaataggagtgacgcagaacgtattgtacgagaatcaaaagttgatcgcaaaccagttcaattctgccattggaaagatacaagattccctttcttctaccgcctcagccctgggtaagttgcaagatgtcgtcaaccaaaatgcacaggctttgaataccttggtaaaacaattgtcatccaatttcggcgccataagctcagtacttaacgatatcttgtcacgattggatccccccgaagccgaggtccaaatcgataggctcatcacgggacggctccagagccttcaaacctatgtgacgcaacaactgatacgggccgcagaaatccgagcgtccgccaacttggcagctaccaagatgtccgaatgtgtactgggtcaatcaaagagagttgatttctgtggaaaaggataccatctcatgtcattcccccaaagcgccccgcacggcgtcgtgttcctccatgtgacttacgttccagcacaagaaaaaaacttcacaactgcgcccgctatctgccatgacgggaaggcgcacttcccacgagagggtgtatttgtgtcaaatggaacgcactggttcgtaacgcaaaggaacttctatgaaccgcagataatcacgactgacaacacttttgtatctggcaattgtgatgtggtcatcgggatagttaacaacactgtctatgacccgctgcaacccgagcttgattcatttaaagaagaactcgataaatatttcaagaatcacaccagtcccgatgtggaccttggagacatttccgggataaatgcctctgtggtaaacatccaaaaggaaatcgatcggctgaatgaagtggccaaaaacttgaacgaaagtctgatagaccttcaggagctcgggaagtatgaacaatacataaagtggccatggtacatctggcttgggttcatcgctggcctcatagccatcgttatggttaccatcatgctctgctgtatgacttcctgttgttcctgtctcaaagggtgttgcagctgtggtagctgctgcaaatttgacgaggatgactcagaacccgtcttgaagggagtcaagttgcactacacttagtgataa

SEQ ID NO: 98 - DNA, 3828 bp, Artificial Sequence
  Description of Artificial Sequence: Synthetic polynucleotide
  pKL025
atgtttgtttttcttgttcttctgccattggtgtcttcccaatgtgtgaacttgactacccgcacacagctcccgccggcgtacactaactccttcacccggggggtttactacccggacaaagtgttccgcagcagtgtcctgcattcaacacaagatttgttccttccattctttagcaatgtcacttggttccatgctatacacgtgagtggcactaacggcactaagcgcttcgataacccggttctgccgtttaatgatggcgtttacttcgcaagtactgagaaatcaaacattatacgggggtggatattcggtactacattggatagtaaaactcaaagccttttgattgtcaacaatgcaactaatgtagtcataaaagtttgtgaattccaattctgtaacgatccctttcttggtgtgtattaccacaagaataacaaatcatggatggagtctgaatttcgagtatacagtagcgccaataattgcacgtttgagtatgtaagccagccgtttctgatggacttggaaggaaagcaaggcaactttaagaacctcagggagttcgtattcaaaaatatagacggttacttcaagatttactcaaaacatacacctatcaacttggtccgagatctcccacaaggtttttcagcgctcgagccattggtggacctgcccatcggaatcaacattacccgattccagacactgcttgcactgcaccggagttatctcacacccggcgacagctcgtctggttggacggcgggagctgccgcttactatgtcggttacttgcaacctcggacatttcttctgaagtataacgaaaacggtacgatcaccgatgccgtagactgcgctctcgatcccctttcagagacgaagtgcacgctcaaatcatttactgtggaaaaaggaatttatcaaacgagcaatttcagggtgcaacccacggagtccatcgtacgattcccaaacataacaaatctttgcccgtttggcgaggtttttaatgctacgcgctttgcatcagtgtacgcttggaataggaaacgaatctcaaattgtgttgcggattattccgtgttgtataattccgcaagcttctccacctttaaatgttatggcgtgtcccccacaaaacttaacgatctttgctttacaaatgtctatgcggattcattcgttatccgaggggatgaagtgcgacaaatcgctcctgggcagacagggaagatagctgattacaattacaaacttccagacgattttacaggatgtgtaatcgcgtggaactcaaacaatttggacagtaaggttggtggcaactacaattatctgtatagacttttcagaaaaagtaacctcaaacctttcgaacgcgacattagcactgagatataccaggccggatcaactccttgtaacggtgttgaaggtttcaactgttactttccgctccaatcctacggctttcaaccaacgaacggtgtcgggtaccaaccatacagagttgtcgtcttgagttttgagcttttgcacgcacctgcaaccgtgtgtggtccgaagaaaagtactaatctggttaaaaataaatgcgtcaatttcaactttaatgggttgacgggcacaggcgtgctgacagagtccaataaaaagtttttgccctttcagcagtttgggagggacatcgccgatacgaccgatgccgtccgagatcctcaaacccttgaaatattggacattaccccctgtagttttggcggtgtaagtgtgattactcccggaacgaatacatctaaccaggtagcggtgctttatcaagatgtcaactgtacagaggtccccgtggcgattcacgccgatcagttgacacccacatggagggtttacagcacaggatccaacgtcttccagacgagagcaggatgcttgatcggtgccgagcatgtgaataacagctacgaatgtgacattccgattggtgctggaatctgcgcaagttaccaaactcaaacgaattcccctggctccgcctcctctgtggcatcccagtctataatcgcgtatacgatgtcactgggcgccgagaattctgtcgcatatagcaacaactccatcgcaatacccacaaattttacaatttctgtgaccacggaaattctgcccgtcagcatgacaaaaactagcgtggactgcacgatgtatatctgcggcgactccacagagtgttccaacctcctcttgcaatatggcagcttttgcacacaattgaaccgagcgctcaccgggatagcggtcgagcaagataagaatacccaagaggtgtttgcccaggtgaagcaaatctataagacccctccaataaaggattttggcggcttcaatttctcacaaattttgcccgatccatctaagccgtccaagcgatcatttattgaggatctgctgttcaacaaagtcactctcgccgacgcggggtttattaaacaatatggcgattgcctgggcgacatcgccgccagggaccttatatgcgcccagaagttcaacggtctcaccgtgctgccaccattgttgactgacgaaatgatcgcacagtatacgtcagcgctgctggctggtaccattacttctggctggacattcggagccggtgcagcccttcagattccatttgcaatgcagatggcctatagatttaatggaataggagtgacgcagaacgtattgtacgagaatcaaaagttgatcgcaaaccagttcaattctgccattggaaagatacaagattccctttcttctaccgcctcagccctgggtaagttgcaagatgtcgtcaaccaaaatgcacaggctttgaataccttggtaaaacaattgtcatccaatttcggcgccataagctcagtacttaacgatatcttgtcacgattggatccccccgaagccgaggtccaaatcgataggctcatcacgggacggctccagagccttcaaacctatgtgacgcaacaactgatacgggccgcagaaatccgagcgtccgccaacttggcagctaccaagatgtccgaatgtgtactgggtcaatcaaagagagttgatttctgtggaaaaggataccatctcatgtcattcccccaaagcgccccgcacggcgtcgtgttcctccatgtgacttacgttccagcacaagaaaaaaacttcacaactgcgcccgctatctgccatgacgggaaggcgcacttcccacgagagggtgtatttgtgtcaaatggaacgcactggttcgtaacgcaaaggaacttctatgaaccgcagataatcacgactgacaacacttttgtatctggcaattgtgatgtggtcatcgggatagttaacaacactgtctatgacccgctgcaacccgagcttgattcatttaaagaagaactcgataaatatttcaagaatcacaccagtcccgatgtggaccttggagacatttccgggataaatgcctctgtggtaaacatccaaaaggaaatcgatcggctgaatgaagtggccaaaaacttgaacgaaagtctgatagaccttcaggagctcgggaagtatgaacaatacataaagtggccatggtacatctggcttgggttcatcgctggcctcatagccatcgttatggttaccatcatgctctgctgtatgacttcctgttgttcctgtctcaaagggtgttgcagctgtggtagctgctgcaaatttgacgaggatgactcagaacccgtcttgaagggagtcgcgttggcctacacttagtgataa

SEQ ID NO: 99 - DNA, 3789 bp, Artificial Sequence
  Description of Artificial Sequence: Synthetic polynucleotide
  pKL026
atgtttgtttttcttgttcttctgccattggtgtcttcccaatgtgtgaacttgactacccgcacacagctcccgccggcgtacactaactccttcacccggggggtttactacccggacaaagtgttccgcagcagtgtcctgcattcaacacaagatttgttccttccattctttagcaatgtcacttggttccatgctatacacgtgagtggcactaacggcactaagcgcttcgataacccggttctgccgtttaatgatggcgtttacttcgcaagtactgagaaatcaaacattatacgggggtggatattcggtactacattggatagtaaaactcaaagccttttgattgtcaacaatgcaactaatgtagtcataaaagtttgtgaattccaattctgtaacgatccctttcttggtgtgtattaccacaagaataacaaatcatggatggagtctgaatttcgagtatacagtagcgccaataattgcacgtttgagtatgtaagccagccgtttctgatggacttggaaggaaagcaaggcaactttaagaacctcagggagttcgtattcaaaaatatagacggttacttcaagatttactcaaaacatacacctatcaacttggtccgagatctcccacaaggtttttcagcgctcgagccattggtggacctgcccatcggaatcaacattacccgattccagacactgcttgcactgcaccggagttatctcacacccggcgacagctcgtctggttggacggcgggagctgccgcttactatgtcggttacttgcaacctcggacatttcttctgaagtataacgaaaacggtacgatcaccgatgccgtagactgcgctctcgatcccctttcagagacgaagtgcacgctcaaatcatttactgtggaaaaaggaatttatcaaacgagcaatttcagggtgcaacccacggagtccatcgtacgattcccaaacataacaaatctttgcccgtttggcgaggtttttaatgctacgcgctttgcatcagtgtacgcttggaataggaaacgaatctcaaattgtgttgcggattattccgtgttgtataattccgcaagcttctccacctttaaatgttatggcgtgtcccccacaaaacttaacgatctttgctttacaaatgtctatgcggattcattcgttatccgaggggatgaagtgcgacaaatcgctcctgggcagacagggaagatagctgattacaattacaaacttccagacgattttacaggatgtgtaatcgcgtggaactcaaacaatttggacagtaaggttggtggcaactacaattatctgtatagacttttcagaaaaagtaacctcaaacctttcgaacgcgacattagcactgagatataccaggccggatcaactccttgtaacggtgttgaaggtttcaactgttactttccgctccaatcctacggctttcaaccaacgaacggtgtcgggtaccaaccatacagagttgtcgtcttgagttttgagcttttgcacgcacctgcaaccgtgtgtggtccgaagaaaagtactaatctggttaaaaataaatgcgtcaatttcaactttaatgggttgacgggcacaggcgtgctgacagagtccaataaaaagtttttgccctttcagcagtttgggagggacatcgccgatacgaccgatgccgtccgagatcctcaaacccttgaaatattggacattaccccctgtagttttggcggtgtaagtgtgattactcccggaacgaatacatctaaccaggtagcggtgctttatcaagatgtcaactgtacagaggtccccgtggcgattcacgccgatcagttgacacccacatggagggtttacagcacaggatccaacgtcttccagacgagagcaggatgcttgatcggtgccgagcatgtgaataacagctacgaatgtgacattccgattggtgctggaatctgcgcaagttaccaaactcaaacgaattcccctggctccgcctcctctgtggcatcccagtctataatcgcgtatacgatgtcactgggcgccgagaattctgtcgcatatagcaacaactccatcgcaatacccacaaattttacaatttctgtgaccacggaaattctgcccgtcagcatgacaaaaactagcgtggactgcacgatgtatatctgcggcgactccacagagtgttccaacctcctcttgcaatatggcagcttttgcacacaattgaaccgagcgctcaccgggatagcggtcgagcaagataagaatacccaagaggtgtttgcccaggtgaagcaaatctataagacccctccaataaaggattttggcggcttcaatttctcacaaattttgcccgatccatctaagccgtccaagcgatcatttattgaggatctgctgttcaacaaagtcactctcgccgacgcggggtttattaaacaatatggcgattgcctgggcgacatcgccgccagggaccttatatgcgcccagaagttcaacggtctcaccgtgctgccaccattgttgactgacgaaatgatcgcacagtatacgtcagcgctgctggctggtaccattacttctggctggacattcggagccggtgcagcccttcagattccatttgcaatgcagatggcctatagatttaatggaataggagtgacgcagaacgtattgtacgagaatcaaaagttgatcgcaaaccagttcaattctgccattggaaagatacaagattccctttcttctaccgcctcagccctgggtaagttgcaagatgtcgtcaaccaaaatgcacaggctttgaataccttggtaaaacaattgtcatccaatttcggcgccataagctcagtacttaacgatatcttgtcacgattggatccccccgaagccgaggtccaaatcgataggctcatcacgggacggctccagagccttcaaacctatgtgacgcaacaactgatacgggccgcagaaatccgagcgtccgccaacttggcagctaccaagatgtccgaatgtgtactgggtcaatcaaagagagttgatttctgtggaaaaggataccatctcatgtcattcccccaaagcgccccgcacggcgtcgtgttcctccatgtgacttacgttccagcacaagaaaaaaacttcacaactgcgcccgctatctgccatgacgggaaggcgcacttcccacgagagggtgtatttgtgtcaaatggaacgcactggttcgtaacgcaaaggaacttctatgaaccgcagataatcacgactgacaacacttttgtatctggcaattgtgatgtggtcatcgggatagttaacaacactgtctatgacccgctgcaacccgagcttgattcatttaaagaagaactcgataaatatttcaagaatcacaccagtcccgatgtggaccttggagacatttccgggataaatgcctctgtggtaaacatccaaaaggaaatcgatcggctgaatgaagtggccaaaaacttgaacgaaagtctgatagaccttcaggagctcgggaagtatgaacaatacataaagtggccatggtacatctggcttgggttcatcgctggcctcatagccatcgttatggttaccatcatgctctgctgtatgacttcctgttgttcctgtctcaaagggtgttgcagctgtggtagctgctgcaaatttgacgaggatgactagtgataa

SEQ ID NO: 100 - DNA, 3834 bp, Artificial Sequence
  Description of Artificial Sequence: Synthetic polynucleotide
  pKL027
atgggtgttaaagtgcttttcgctcttatctgtatagctgtcgctgaggcaaagaacttgactacccgcacacagctcccgccggcgtacactaactccttcacccggggggtttactacccggacaaagtgttccgcagcagtgtcctgcattcaacacaagatttgttccttccattctttagcaatgtcacttggttccatgctatacacgtgagtggcactaacggcactaagcgcttcgataacccggttctgccgtttaatgatggcgtttacttcgcaagtactgagaaatcaaacattatacgggggtggatattcggtactacattggatagtaaaactcaaagccttttgattgtcaacaatgcaactaatgtagtcataaaagtttgtgaattccaattctgtaacgatccctttcttggtgtgtattaccacaagaataacaaatcatggatggagtctgaatttcgagtatacagtagcgccaataattgcacgtttgagtatgtaagccagccgtttctgatggacttggaaggaaagcaaggcaactttaagaacctcagggagttcgtattcaaaaatatagacggttacttcaagatttactcaaaacatacacctatcaacttggtccgagatctcccacaaggtttttcagcgctcgagccattggtggacctgcccatcggaatcaacattacccgattccagacactgcttgcactgcaccggagttatctcacacccggcgacagctcgtctggttggacggcgggagctgccgcttactatgtcggttacttgcaacctcggacatttcttctgaagtataacgaaaacggtacgatcaccgatgccgtagactgcgctctcgatcccctttcagagacgaagtgcacgctcaaatcatttactgtggaaaaaggaatttatcaaacgagcaatttcagggtgcaacccacggagtccatcgtacgattcccaaacataacaaatctttgcccgtttggcgaggtttttaatgctacgcgctttgcatcagtgtacgcttggaataggaaacgaatctcaaattgtgttgcggattattccgtgttgtataattccgcaagcttctccacctttaaatgttatggcgtgtcccccacaaaacttaacgatctttgctttacaaatgtctatgcggattcattcgttatccgaggggatgaagtgcgacaaatcgctcctgggcagacagggaagatagctgattacaattacaaacttccagacgattttacaggatgtgtaatcgcgtggaactcaaacaatttggacagtaaggttggtggcaactacaattatctgtatagacttttcagaaaaagtaacctcaaacctttcgaacgcgacattagcactgagatataccaggccggatcaactccttgtaacggtgttgaaggtttcaactgttactttccgctccaatcctacggctttcaaccaacgaacggtgtcgggtaccaaccatacagagttgtcgtcttgagttttgagcttttgcacgcacctgcaaccgtgtgtggtccgaagaaaagtactaatctggttaaaaataaatgcgtcaatttcaactttaatgggttgacgggcacaggcgtgctgacagagtccaataaaaagtttttgccctttcagcagtttgggagggacatcgccgatacgaccgatgccgtccgagatcctcaaacccttgaaatattggacattaccccctgtagttttggcggtgtaagtgtgattactcccggaacgaatacatctaaccaggtagcggtgctttatcaagatgtcaactgtacagaggtccccgtggcgattcacgccgatcagttgacacccacatggagggtttacagcacaggatccaacgtcttccagacgagagcaggatgcttgatcggtgccgagcatgtgaataacagctacgaatgtgacattccgattggtgctggaatctgcgcaagttaccaaactcaaacgaattcccctggctccgcctcctctgtggcatcccagtctataatcgcgtatacgatgtcactgggcgccgagaattctgtcgcatatagcaacaactccatcgcaatacccacaaattttacaatttctgtgaccacggaaattctgcccgtcagcatgacaaaaactagcgtggactgcacgatgtatatctgcggcgactccacagagtgttccaacctcctcttgcaatatggcagcttttgcacacaattgaaccgagcgctcaccgggatagcggtcgagcaagataagaatacccaagaggtgtttgcccaggtgaagcaaatctataagacccctccaataaaggattttggcggcttcaatttctcacaaattttgcccgatccatctaagccgtccaagcgatcatttattgaggatctgctgttcaacaaagtcactctcgccgacgcggggtttattaaacaatatggcgattgcctgggcgacatcgccgccagggaccttatatgcgcccagaagttcaacggtctcaccgtgctgccaccattgttgactgacgaaatgatcgcacagtatacgtcagcgctgctggctggtaccattacttctggctggacattcggagccggtgcagcccttcagattccatttgcaatgcagatggcctatagatttaatggaataggagtgacgcagaacgtattgtacgagaatcaaaagttgatcgcaaaccagttcaattctgccattggaaagatacaagattccctttcttctaccgcctcagccctgggtaagttgcaagatgtcgtcaaccaaaatgcacaggctttgaataccttggtaaaacaattgtcatccaatttcggcgccataagctcagtacttaacgatatcttgtcacgattggatccccccgaagccgaggtccaaatcgataggctcatcacgggacggctccagagccttcaaacctatgtgacgcaacaactgatacgggccgcagaaatccgagcgtccgccaacttggcagctaccaagatgtccgaatgtgtactgggtcaatcaaagagagttgatttctgtggaaaaggataccatctcatgtcattcccccaaagcgccccgcacggcgtcgtgttcctccatgtgacttacgttccagcacaagaaaaaaacttcacaactgcgcccgctatctgccatgacgggaaggcgcacttcccacgagagggtgtatttgtgtcaaatggaacgcactggttcgtaacgcaaaggaacttctatgaaccgcagataatcacgactgacaacacttttgtatctggcaattgtgatgtggtcatcgggatagttaacaacactgtctatgacccgctgcaacccgagcttgattcatttaaagaagaactcgataaatatttcaagaatcacaccagtcccgatgtggaccttggagacatttccgggataaatgcctctgtggtaaacatccaaaaggaaatcgatcggctgaatgaagtggccaaaaacttgaacgaaagtctgatagaccttcaggagctcgggaagtatgaacaatacataaagtggccatggtacatctggcttgggttcatcgctggcctcatagccatcgttatggttaccatcatgctctgctgtatgacttcctgttgttcctgtctcaaagggtgttgcagctgtggtagctgctgcaaatttgacgaggatgactcagaacccgtcttgaagggagtcaagttgcactacacttagtgataa

SEQ ID NO: 101 - DNA, 3828 bp, Artificial Sequence
  Description of Artificial Sequence: Synthetic polynucleotide
  pKL028
atgggtgttaaagtgcttttcgctcttatctgtatagctgtcgctgaggcaaagactacccgcacacagctcccgccggcgtacactaactccttcacccggggggtttactacccggacaaagtgttccgcagcagtgtcctgcattcaacacaagatttgttccttccattctttagcaatgtcacttggttccatgctatacacgtgagtggcactaacggcactaagcgcttcgataacccggttctgccgtttaatgatggcgtttacttcgcaagtactgagaaatcaaacattatacgggggtggatattcggtactacattggatagtaaaactcaaagccttttgattgtcaacaatgcaactaatgtagtcataaaagtttgtgaattccaattctgtaacgatccctttcttggtgtgtattaccacaagaataacaaatcatggatggagtctgaatttcgagtatacagtagcgccaataattgcacgtttgagtatgtaagccagccgtttctgatggacttggaaggaaagcaaggcaactttaagaacctcagggagttcgtattcaaaaatatagacggttacttcaagatttactcaaaacatacacctatcaacttggtccgagatctcccacaaggtttttcagcgctcgagccattggtggacctgcccatcggaatcaacattacccgattccagacactgcttgcactgcaccggagttatctcacacccggcgacagctcgtctggttggacggcgggagctgccgcttactatgtcggttacttgcaacctcggacatttcttctgaagtataacgaaaacggtacgatcaccgatgccgtagactgcgctctcgatcccctttcagagacgaagtgcacgctcaaatcatttactgtggaaaaaggaatttatcaaacgagcaatttcagggtgcaacccacggagtccatcgtacgattcccaaacataacaaatctttgcccgtttggcgaggtttttaatgctacgcgctttgcatcagtgtacgcttggaataggaaacgaatctcaaattgtgttgcggattattccgtgttgtataattccgcaagcttctccacctttaaatgttatggcgtgtcccccacaaaacttaacgatctttgctttacaaatgtctatgcggattcattcgttatccgaggggatgaagtgcgacaaatcgctcctgggcagacagggaagatagctgattacaattacaaacttccagacgattttacaggatgtgtaatcgcgtggaactcaaacaatttggacagtaaggttggtggcaactacaattatctgtatagacttttcagaaaaagtaacctcaaacctttcgaacgcgacattagcactgagatataccaggccggatcaactccttgtaacggtgttgaaggtttcaactgttactttccgctccaatcctacggctttcaaccaacgaacggtgtcgggtaccaaccatacagagttgtcgtcttgagttttgagcttttgcacgcacctgcaaccgtgtgtggtccgaagaaaagtactaatctggttaaaaataaatgcgtcaatttcaactttaatgggttgacgggcacaggcgtgctgacagagtccaataaaaagtttttgccctttcagcagtttgggagggacatcgccgatacgaccgatgccgtccgagatcctcaaacccttgaaatattggacattaccccctgtagttttggcggtgtaagtgtgattactcccggaacgaatacatctaaccaggtagcggtgctttatcaagatgtcaactgtacagaggtccccgtggcgattcacgccgatcagttgacacccacatggagggtttacagcacaggatccaacgtcttccagacgagagcaggatgcttgatcggtgccgagcatgtgaataacagctacgaatgtgacattccgattggtgctggaatctgcgcaagttaccaaactcaaacgaattcccctggctccgcctcctctgtggcatcccagtctataatcgcgtatacgatgtcactgggcgccgagaattctgtcgcatatagcaacaactccatcgcaatacccacaaattttacaatttctgtgaccacggaaattctgcccgtcagcatgacaaaaactagcgtggactgcacgatgtatatctgcggcgactccacagagtgttccaacctcctcttgcaatatggcagcttttgcacacaattgaaccgagcgctcaccgggatagcggtcgagcaagataagaatacccaagaggtgtttgcccaggtgaagcaaatctataagacccctccaataaaggattttggcggcttcaatttctcacaaattttgcccgatccatctaagccgtccaagcgatcatttattgaggatctgctgttcaacaaagtcactctcgccgacgcggggtttattaaacaatatggcgattgcctgggcgacatcgccgccagggaccttatatgcgcccagaagttcaacggtctcaccgtgctgccaccattgttgactgacgaaatgatcgcacagtatacgtcagcgctgctggctggtaccattacttctggctggacattcggagccggtgcagcccttcagattccatttgcaatgcagatggcctatagatttaatggaataggagtgacgcagaacgtattgtacgagaatcaaaagttgatcgcaaaccagttcaattctgccattggaaagatacaagattccctttcttctaccgcctcagccctgggtaagttgcaagatgtcgtcaaccaaaatgcacaggctttgaataccttggtaaaacaattgtcatccaatttcggcgccataagctcagtacttaacgatatcttgtcacgattggatccccccgaagccgaggtccaaatcgataggctcatcacgggacggctccagagccttcaaacctatgtgacgcaacaactgatacgggccgcagaaatccgagcgtccgccaacttggcagctaccaagatgtccgaatgtgtactgggtcaatcaaagagagttgatttctgtggaaaaggataccatctcatgtcattcccccaaagcgccccgcacggcgtcgtgttcctccatgtgacttacgttccagcacaagaaaaaaacttcacaactgcgcccgctatctgccatgacgggaaggcgcacttcccacgagagggtgtatttgtgtcaaatggaacgcactggttcgtaacgcaaaggaacttctatgaaccgcagataatcacgactgacaacacttttgtatctggcaattgtgatgtggtcatcgggatagttaacaacactgtctatgacccgctgcaacccgagcttgattcatttaaagaagaactcgataaatatttcaagaatcacaccagtcccgatgtggaccttggagacatttccgggataaatgcctctgtggtaaacatccaaaaggaaatcgatcggctgaatgaagtggccaaaaacttgaacgaaagtctgatagaccttcaggagctcgggaagtatgaacaatacataaagtggccatggtacatctggcttgggttcatcgctggcctcatagccatcgttatggttaccatcatgctctgctgtatgacttcctgttgttcctgtctcaaagggtgttgcagctgtggtagctgctgcaaatttgacgaggatgactcagaacccgtcttgaagggagtcaagttgcactacacttagtgataa

SEQ ID NO: 102 - DNA, 3852 bp, Artificial Sequence
  Description of Artificial Sequence: Synthetic polynucleotide
  pKL029
atgcctatgggctctctgcaaccccttgcaaccctttatttgttggggatgcttgtcgcgtccgtcctcgcgaacttgactacccgcacacagctcccgccggcgtacactaactccttcacccggggggtttactacccggacaaagtgttccgcagcagtgtcctgcattcaacacaagatttgttccttccattctttagcaatgtcacttggttccatgctatacacgtgagtggcactaacggcactaagcgcttcgataacccggttctgccgtttaatgatggcgtttacttcgcaagtactgagaaatcaaacattatacgggggtggatattcggtactacattggatagtaaaactcaaagccttttgattgtcaacaatgcaactaatgtagtcataaaagtttgtgaattccaattctgtaacgatccctttcttggtgtgtattaccacaagaataacaaatcatggatggagtctgaatttcgagtatacagtagcgccaataattgcacgtttgagtatgtaagccagccgtttctgatggacttggaaggaaagcaaggcaactttaagaacctcagggagttcgtattcaaaaatatagacggttacttcaagatttactcaaaacatacacctatcaacttggtccgagatctcccacaaggtttttcagcgctcgagccattggtggacctgcccatcggaatcaacattacccgattccagacactgcttgcactgcaccggagttatctcacacccggcgacagctcgtctggttggacggcgggagctgccgcttactatgtcggttacttgcaacctcggacatttcttctgaagtataacgaaaacggtacgatcaccgatgccgtagactgcgctctcgatcccctttcagagacgaagtgcacgctcaaatcatttactgtggaaaaaggaatttatcaaacgagcaatttcagggtgcaacccacggagtccatcgtacgattcccaaacataacaaatctttgcccgtttggcgaggtttttaatgctacgcgctttgcatcagtgtacgcttggaataggaaacgaatctcaaattgtgttgcggattattccgtgttgtataattccgcaagcttctccacctttaaatgttatggcgtgtcccccacaaaacttaacgatctttgctttacaaatgtctatgcggattcattcgttatccgaggggatgaagtgcgacaaatcgctcctgggcagacagggaagatagctgattacaattacaaacttccagacgattttacaggatgtgtaatcgcgtggaactcaaacaatttggacagtaaggttggtggcaactacaattatctgtatagacttttcagaaaaagtaacctcaaacctttcgaacgcgacattagcactgagatataccaggccggatcaactccttgtaacggtgttgaaggtttcaactgttactttccgctccaatcctacggctttcaaccaacgaacggtgtcgggtaccaaccatacagagttgtcgtcttgagttttgagcttttgcacgcacctgcaaccgtgtgtggtccgaagaaaagtactaatctggttaaaaataaatgcgtcaatttcaactttaatgggttgacgggcacaggcgtgctgacagagtccaataaaaagtttttgccctttcagcagtttgggagggacatcgccgatacgaccgatgccgtccgagatcctcaaacccttgaaatattggacattaccccctgtagttttggcggtgtaagtgtgattactcccggaacgaatacatctaaccaggtagcggtgctttatcaagatgtcaactgtacagaggtccccgtggcgattcacgccgatcagttgacacccacatggagggtttacagcacaggatccaacgtcttccagacgagagcaggatgcttgatcggtgccgagcatgtgaataacagctacgaatgtgacattccgattggtgctggaatctgcgcaagttaccaaactcaaacgaattcccctggctccgcctcctctgtggcatcccagtctataatcgcgtatacgatgtcactgggcgccgagaattctgtcgcatatagcaacaactccatcgcaatacccacaaattttacaatttctgtgaccacggaaattctgcccgtcagcatgacaaaaactagcgtggactgcacgatgtatatctgcggcgactccacagagtgttccaacctcctcttgcaatatggcagcttttgcacacaattgaaccgagcgctcaccgggatagcggtcgagcaagataagaatacccaagaggtgtttgcccaggtgaagcaaatctataagacccctccaataaaggattttggcggcttcaatttctcacaaattttgcccgatccatctaagccgtccaagcgatcatttattgaggatctgctgttcaacaaagtcactctcgccgacgcggggtttattaaacaatatggcgattgcctgggcgacatcgccgccagggaccttatatgcgcccagaagttcaacggtctcaccgtgctgccaccattgttgactgacgaaatgatcgcacagtatacgtcagcgctgctggctggtaccattacttctggctggacattcggagccggtgcagcccttcagattccatttgcaatgcagatggcctatagatttaatggaataggagtgacgcagaacgtattgtacgagaatcaaaagttgatcgcaaaccagttcaattctgccattggaaagatacaagattccctttcttctaccgcctcagccctgggtaagttgcaagatgtcgtcaaccaaaatgcacaggctttgaataccttggtaaaacaattgtcatccaatttcggcgccataagctcagtacttaacgatatcttgtcacgattggatccccccgaagccgaggtccaaatcgataggctcatcacgggacggctccagagccttcaaacctatgtgacgcaacaactgatacgggccgcagaaatccgagcgtccgccaacttggcagctaccaagatgtccgaatgtgtactgggtcaatcaaagagagttgatttctgtggaaaaggataccatctcatgtcattcccccaaagcgccccgcacggcgtcgtgttcctccatgtgacttacgttccagcacaagaaaaaaacttcacaactgcgcccgctatctgccatgacgggaaggcgcacttcccacgagagggtgtatttgtgtcaaatggaacgcactggttcgtaacgcaaaggaacttctatgaaccgcagataatcacgactgacaacacttttgtatctggcaattgtgatgtggtcatcgggatagttaacaacactgtctatgacccgctgcaacccgagcttgattcatttaaagaagaactcgataaatatttcaagaatcacaccagtcccgatgtggaccttggagacatttccgggataaatgcctctgtggtaaacatccaaaaggaaatcgatcggctgaatgaagtggccaaaaacttgaacgaaagtctgatagaccttcaggagctcgggaagtatgaacaatacataaagtggccatggtacatctggcttgggttcatcgctggcctcatagccatcgttatggttaccatcatgctctgctgtatgacttcctgttgttcctgtctcaaagggtgttgcagctgtggtagctgctgcaaatttgacgaggatgactcagaacccgtcttgaagggagtcaagttgcactacacttagtgataa

SEQ ID NO: 103 - DNA, 3846 bp, Artificial Sequence
  Description of Artificial Sequence: Synthetic polynucleotide
  pKL030
atgcctatgggctctctgcaaccccttgcaaccctttatttgttggggatgcttgtcgcgtccgtcctcgcgactacccgcacacagctcccgccggcgtacactaactccttcacccggggggtttactacccggacaaagtgttccgcagcagtgtcctgcattcaacacaagatttgttccttccattctttagcaatgtcacttggttccatgctatacacgtgagtggcactaacggcactaagcgcttcgataacccggttctgccgtttaatgatggcgtttacttcgcaagtactgagaaatcaaacattatacgggggtggatattcggtactacattggatagtaaaactcaaagccttttgattgtcaacaatgcaactaatgtagtcataaaagtttgtgaattccaattctgtaacgatccctttcttggtgtgtattaccacaagaataacaaatcatggatggagtctgaatttcgagtatacagtagcgccaataattgcacgtttgagtatgtaagccagccgtttctgatggacttggaaggaaagcaaggcaactttaagaacctcagggagttcgtattcaaaaatatagacggttacttcaagatttactcaaaacatacacctatcaacttggtccgagatctcccacaaggtttttcagcgctcgagccattggtggacctgcccatcggaatcaacattacccgattccagacactgcttgcactgcaccggagttatctcacacccggcgacagctcgtctggttggacggcgggagctgccgcttactatgtcggttacttgcaacctcggacatttcttctgaagtataacgaaaacggtacgatcaccgatgccgtagactgcgctctcgatcccctttcagagacgaagtgcacgctcaaatcatttactgtggaaaaaggaatttatcaaacgagcaatttcagggtgcaacccacggagtccatcgtacgattcccaaacataacaaatctttgcccgtttggcgaggtttttaatgctacgcgctttgcatcagtgtacgcttggaataggaaacgaatctcaaattgtgttgcggattattccgtgttgtataattccgcaagcttctccacctttaaatgttatggcgtgtcccccacaaaacttaacgatctttgctttacaaatgtctatgcggattcattcgttatccgaggggatgaagtgcgacaaatcgctcctgggcagacagggaagatagctgattacaattacaaacttccagacgattttacaggatgtgtaatcgcgtggaactcaaacaatttggacagtaaggttggtggcaactacaattatctgtatagacttttcagaaaaagtaacctcaaacctttcgaacgcgacattagcactgagatataccaggccggatcaactccttgtaacggtgttgaaggtttcaactgttactttccgctccaatcctacggctttcaaccaacgaacggtgtcgggtaccaaccatacagagttgtcgtcttgagttttgagcttttgcacgcacctgcaaccgtgtgtggtccgaagaaaagtactaatctggttaaaaataaatgcgtcaatttcaactttaatgggttgacgggcacaggcgtgctgacagagtccaataaaaagtttttgccctttcagcagtttgggagggacatcgccgatacgaccgatgccgtccgagatcctcaaacccttgaaatattggacattaccccctgtagttttggcggtgtaagtgtgattactcccggaacgaatacatctaaccaggtagcggtgctttatcaagatgtcaactgtacagaggtccccgtggcgattcacgccgatcagttgacacccacatggagggtttacagcacaggatccaacgtcttccagacgagagcaggatgcttgatcggtgccgagcatgtgaataacagctacgaatgtgacattccgattggtgctggaatctgcgcaagttaccaaactcaaacgaattcccctggctccgcctcctctgtggcatcccagtctataatcgcgtatacgatgtcactgggcgccgagaattctgtcgcatatagcaacaactccatcgcaatacccacaaattttacaatttctgtgaccacggaaattctgcccgtcagcatgacaaaaactagcgtggactgcacgatgtatatctgcggcgactccacagagtgttccaacctcctcttgcaatatggcagcttttgcacacaattgaaccgagcgctcaccgggatagcggtcgagcaagataagaatacccaagaggtgtttgcccaggtgaagcaaatctataagacccctccaataaaggattttggcggcttcaatttctcacaaattttgcccgatccatctaagccgtccaagcgatcatttattgaggatctgctgttcaacaaagtcactctcgccgacgcggggtttattaaacaatatggcgattgcctgggcgacatcgccgccagggaccttatatgcgcccagaagttcaacggtctcaccgtgctgccaccattgttgactgacgaaatgatcgcacagtatacgtcagcgctgctggctggtaccattacttctggctggacattcggagccggtgcagcccttcagattccatttgcaatgcagatggcctatagatttaatggaataggagtgacgcagaacgtattgtacgagaatcaaaagttgatcgcaaaccagttcaattctgccattggaaagatacaagattccctttcttctaccgcctcagccctgggtaagttgcaagatgtcgtcaaccaaaatgcacaggctttgaataccttggtaaaacaattgtcatccaatttcggcgccataagctcagtacttaacgatatcttgtcacgattggatccccccgaagccgaggtccaaatcgataggctcatcacgggacggctccagagccttcaaacctatgtgacgcaacaactgatacgggccgcagaaatccgagcgtccgccaacttggcagctaccaagatgtccgaatgtgtactgggtcaatcaaagagagttgatttctgtggaaaaggataccatctcatgtcattcccccaaagcgccccgcacggcgtcgtgttcctccatgtgacttacgttccagcacaagaaaaaaacttcacaactgcgcccgctatctgccatgacgggaaggcgcacttcccacgagagggtgtatttgtgtcaaatggaacgcactggttcgtaacgcaaaggaacttctatgaaccgcagataatcacgactgacaacacttttgtatctggcaattgtgatgtggtcatcgggatagttaacaacactgtctatgacccgctgcaacccgagcttgattcatttaaagaagaactcgataaatatttcaagaatcacaccagtcccgatgtggaccttggagacatttccgggataaatgcctctgtggtaaacatccaaaaggaaatcgatcggctgaatgaagtggccaaaaacttgaacgaaagtctgatagaccttcaggagctcgggaagtatgaacaatacataaagtggccatggtacatctggcttgggttcatcgctggcctcatagccatcgttatggttaccatcatgctctgctgtatgacttcctgttgttcctgtctcaaagggtgttgcagctgtggtagctgctgcaaatttgacgaggatgactcagaacccgtcttgaagggagtcaagttgcactacacttagtgataa

SEQ ID NO: 104 - DNA, 3828 bp, Artificial Sequence
  Description of Artificial Sequence: Synthetic polynucleotide
  pKL031
atgcccctcttgcttctcttgccactgctgtgggctggggcggcagctaacttgactacccgcacacagctcccgccggcgtacactaactccttcacccggggggtttactacccggacaaagtgttccgcagcagtgtcctgcattcaacacaagatttgttccttccattctttagcaatgtcacttggttccatgctatacacgtgagtggcactaacggcactaagcgcttcgataacccggttctgccgtttaatgatggcgtttacttcgcaagtactgagaaatcaaacattatacgggggtggatattcggtactacattggatagtaaaactcaaagccttttgattgtcaacaatgcaactaatgtagtcataaaagtttgtgaattccaattctgtaacgatccctttcttggtgtgtattaccacaagaataacaaatcatggatggagtctgaatttcgagtatacagtagcgccaataattgcacgtttgagtatgtaagccagccgtttctgatggacttggaaggaaagcaaggcaactttaagaacctcagggagttcgtattcaaaaatatagacggttacttcaagatttactcaaaacatacacctatcaacttggtccgagatctcccacaaggtttttcagcgctcgagccattggtggacctgcccatcggaatcaacattacccgattccagacactgcttgcactgcaccggagttatctcacacccggcgacagctcgtctggttggacggcgggagctgccgcttactatgtcggttacttgcaacctcggacatttcttctgaagtataacgaaaacggtacgatcaccgatgccgtagactgcgctctcgatcccctttcagagacgaagtgcacgctcaaatcatttactgtggaaaaaggaatttatcaaacgagcaatttcagggtgcaacccacggagtccatcgtacgattcccaaacataacaaatctttgcccgtttggcgaggtttttaatgctacgcgctttgcatcagtgtacgcttggaataggaaacgaatctcaaattgtgttgcggattattccgtgttgtataattccgcaagcttctccacctttaaatgttatggcgtgtcccccacaaaacttaacgatctttgctttacaaatgtctatgcggattcattcgttatccgaggggatgaagtgcgacaaatcgctcctgggcagacagggaagatagctgattacaattacaaacttccagacgattttacaggatgtgtaatcgcgtggaactcaaacaatttggacagtaaggttggtggcaactacaattatctgtatagacttttcagaaaaagtaacctcaaacctttcgaacgcgacattagcactgagatataccaggccggatcaactccttgtaacggtgttgaaggtttcaactgttactttccgctccaatcctacggctttcaaccaacgaacggtgtcgggtaccaaccatacagagttgtcgtcttgagttttgagcttttgcacgcacctgcaaccgtgtgtggtccgaagaaaagtactaatctggttaaaaataaatgcgtcaatttcaactttaatgggttgacgggcacaggcgtgctgacagagtccaataaaaagtttttgccctttcagcagtttgggagggacatcgccgatacgaccgatgccgtccgagatcctcaaacccttgaaatattggacattaccccctgtagttttggcggtgtaagtgtgattactcccggaacgaatacatctaaccaggtagcggtgctttatcaagatgtcaactgtacagaggtccccgtggcgattcacgccgatcagttgacacccacatggagggtttacagcacaggatccaacgtcttccagacgagagcaggatgcttgatcggtgccgagcatgtgaataacagctacgaatgtgacattccgattggtgctggaatctgcgcaagttaccaaactcaaacgaattcccctggctccgcctcctctgtggcatcccagtctataatcgcgtatacgatgtcactgggcgccgagaattctgtcgcatatagcaacaactccatcgcaatacccacaaattttacaatttctgtgaccacggaaattctgcccgtcagcatgacaaaaactagcgtggactgcacgatgtatatctgcggcgactccacagagtgttccaacctcctcttgcaatatggcagcttttgcacacaattgaaccgagcgctcaccgggatagcggtcgagcaagataagaatacccaagaggtgtttgcccaggtgaagcaaatctataagacccctccaataaaggattttggcggcttcaatttctcacaaattttgcccgatccatctaagccgtccaagcgatcatttattgaggatctgctgttcaacaaagtcactctcgccgacgcggggtttattaaacaatatggcgattgcctgggcgacatcgccgccagggaccttatatgcgcccagaagttcaacggtctcaccgtgctgccaccattgttgactgacgaaatgatcgcacagtatacgtcagcgctgctggctggtaccattacttctggctggacattcggagccggtgcagcccttcagattccatttgcaatgcagatggcctatagatttaatggaataggagtgacgcagaacgtattgtacgagaatcaaaagttgatcgcaaaccagttcaattctgccattggaaagatacaagattccctttcttctaccgcctcagccctgggtaagttgcaagatgtcgtcaaccaaaatgcacaggctttgaataccttggtaaaacaattgtcatccaatttcggcgccataagctcagtacttaacgatatcttgtcacgattggatccccccgaagccgaggtccaaatcgataggctcatcacgggacggctccagagccttcaaacctatgtgacgcaacaactgatacgggccgcagaaatccgagcgtccgccaacttggcagctaccaagatgtccgaatgtgtactgggtcaatcaaagagagttgatttctgtggaaaaggataccatctcatgtcattcccccaaagcgccccgcacggcgtcgtgttcctccatgtgacttacgttccagcacaagaaaaaaacttcacaactgcgcccgctatctgccatgacgggaaggcgcacttcccacgagagggtgtatttgtgtcaaatggaacgcactggttcgtaacgcaaaggaacttctatgaaccgcagataatcacgactgacaacacttttgtatctggcaattgtgatgtggtcatcgggatagttaacaacactgtctatgacccgctgcaacccgagcttgattcatttaaagaagaactcgataaatatttcaagaatcacaccagtcccgatgtggaccttggagacatttccgggataaatgcctctgtggtaaacatccaaaaggaaatcgatcggctgaatgaagtggccaaaaacttgaacgaaagtctgatagaccttcaggagctcgggaagtatgaacaatacataaagtggccatggtacatctggcttgggttcatcgctggcctcatagccatcgttatggttaccatcatgctctgctgtatgacttcctgttgttcctgtctcaaagggtgttgcagctgtggtagctgctgcaaatttgacgaggatgactcagaacccgtcttgaagggagtcaagttgcactacacttagtgataa

SEQ ID NO: 105 - DNA, 3822 bp, Artificial Sequence
  Description of Artificial Sequence: Synthetic polynucleotide
  pKL032
atgcccctcttgcttctcttgccactgctgtgggctggggcggcagctactacccgcacacagctcccgccggcgtacactaactccttcacccggggggtttactacccggacaaagtgttccgcagcagtgtcctgcattcaacacaagatttgttccttccattctttagcaatgtcacttggttccatgctatacacgtgagtggcactaacggcactaagcgcttcgataacccggttctgccgtttaatgatggcgtttacttcgcaagtactgagaaatcaaacattatacgggggtggatattcggtactacattggatagtaaaactcaaagccttttgattgtcaacaatgcaactaatgtagtcataaaagtttgtgaattccaattctgtaacgatccctttcttggtgtgtattaccacaagaataacaaatcatggatggagtctgaatttcgagtatacagtagcgccaataattgcacgtttgagtatgtaagccagccgtttctgatggacttggaaggaaagcaaggcaactttaagaacctcagggagttcgtattcaaaaatatagacggttacttcaagatttactcaaaacatacacctatcaacttggtccgagatctcccacaaggtttttcagcgctcgagccattggtggacctgcccatcggaatcaacattacccgattccagacactgcttgcactgcaccggagttatctcacacccggcgacagctcgtctggttggacggcgggagctgccgcttactatgtcggttacttgcaacctcggacatttcttctgaagtataacgaaaacggtacgatcaccgatgccgtagactgcgctctcgatcccctttcagagacgaagtgcacgctcaaatcatttactgtggaaaaaggaatttatcaaacgagcaatttcagggtgcaacccacggagtccatcgtacgattcccaaacataacaaatctttgcccgtttggcgaggtttttaatgctacgcgctttgcatcagtgtacgcttggaataggaaacgaatctcaaattgtgttgcggattattccgtgttgtataattccgcaagcttctccacctttaaatgttatggcgtgtcccccacaaaacttaacgatctttgctttacaaatgtctatgcggattcattcgttatccgaggggatgaagtgcgacaaatcgctcctgggcagacagggaagatagctgattacaattacaaacttccagacgattttacaggatgtgtaatcgcgtggaactcaaacaatttggacagtaaggttggtggcaactacaattatctgtatagacttttcagaaaaagtaacctcaaacctttcgaacgcgacattagcactgagatataccaggccggatcaactccttgtaacggtgttgaaggtttcaactgttactttccgctccaatcctacggctttcaaccaacgaacggtgtcgggtaccaaccatacagagttgtcgtcttgagttttgagcttttgcacgcacctgcaaccgtgtgtggtccgaagaaaagtactaatctggttaaaaataaatgcgtcaatttcaactttaatgggttgacgggcacaggcgtgctgacagagtccaataaaaagtttttgccctttcagcagtttgggagggacatcgccgatacgaccgatgccgtccgagatcctcaaacccttgaaatattggacattaccccctgtagttttggcggtgtaagtgtgattactcccggaacgaatacatctaaccaggtagcggtgctttatcaagatgtcaactgtacagaggtccccgtggcgattcacgccgatcagttgacacccacatggagggtttacagcacaggatccaacgtcttccagacgagagcaggatgcttgatcggtgccgagcatgtgaataacagctacgaatgtgacattccgattggtgctggaatctgcgcaagttaccaaactcaaacgaattcccctggctccgcctcctctgtggcatcccagtctataatcgcgtatacgatgtcactgggcgccgagaattctgtcgcatatagcaacaactccatcgcaatacccacaaattttacaatttctgtgaccacggaaattctgcccgtcagcatgacaaaaactagcgtggactgcacgatgtatatctgcggcgactccacagagtgttccaacctcctcttgcaatatggcagcttttgcacacaattgaaccgagcgctcaccgggatagcggtcgagcaagataagaatacccaagaggtgtttgcccaggtgaagcaaatctataagacccctccaataaaggattttggcggcttcaatttctcacaaattttgcccgatccatctaagccgtccaagcgatcatttattgaggatctgctgttcaacaaagtcactctcgccgacgcggggtttattaaacaatatggcgattgcctgggcgacatcgccgccagggaccttatatgcgcccagaagttcaacggtctcaccgtgctgccaccattgttgactgacgaaatgatcgcacagtatacgtcagcgctgctggctggtaccattacttctggctggacattcggagccggtgcagcccttcagattccatttgcaatgcagatggcctatagatttaatggaataggagtgacgcagaacgtattgtacgagaatcaaaagttgatcgcaaaccagttcaattctgccattggaaagatacaagattccctttcttctaccgcctcagccctgggtaagttgcaagatgtcgtcaaccaaaatgcacaggctttgaataccttggtaaaacaattgtcatccaatttcggcgccataagctcagtacttaacgatatcttgtcacgattggatccccccgaagccgaggtccaaatcgataggctcatcacgggacggctccagagccttcaaacctatgtgacgcaacaactgatacgggccgcagaaatccgagcgtccgccaacttggcagctaccaagatgtccgaatgtgtactgggtcaatcaaagagagttgatttctgtggaaaaggataccatctcatgtcattcccccaaagcgccccgcacggcgtcgtgttcctccatgtgacttacgttccagcacaagaaaaaaacttcacaactgcgcccgctatctgccatgacgggaaggcgcacttcccacgagagggtgtatttgtgtcaaatggaacgcactggttcgtaacgcaaaggaacttctatgaaccgcagataatcacgactgacaacacttttgtatctggcaattgtgatgtggtcatcgggatagttaacaacactgtctatgacccgctgcaacccgagcttgattcatttaaagaagaactcgataaatatttcaagaatcacaccagtcccgatgtggaccttggagacatttccgggataaatgcctctgtggtaaacatccaaaaggaaatcgatcggctgaatgaagtggccaaaaacttgaacgaaagtctgatagaccttcaggagctcgggaagtatgaacaatacataaagtggccatggtacatctggcttgggttcatcgctggcctcatagccatcgttatggttaccatcatgctctgctgtatgacttcctgttgttcctgtctcaaagggtgttgcagctgtggtagctgctgcaaatttgacgaggatgactcagaacccgtcttgaagggagtcaagttgcactacacttagtgataa

SEQ ID NO: 106 - DNA, 3840 bp, Artificial Sequence
  Description of Artificial Sequence: Synthetic polynucleotide
  pKL033
atgtaccgaatgcagctcttgtcctgcattgctctcagccttgcacttgtgaccaattccaacttgactacccgcacacagctcccgccggcgtacactaactccttcacccggggggtttactacccggacaaagtgttccgcagcagtgtcctgcattcaacacaagatttgttccttccattctttagcaatgtcacttggttccatgctatacacgtgagtggcactaacggcactaagcgcttcgataacccggttctgccgtttaatgatggcgtttacttcgcaagtactgagaaatcaaacattatacgggggtggatattcggtactacattggatagtaaaactcaaagccttttgattgtcaacaatgcaactaatgtagtcataaaagtttgtgaattccaattctgtaacgatccctttcttggtgtgtattaccacaagaataacaaatcatggatggagtctgaatttcgagtatacagtagcgccaataattgcacgtttgagtatgtaagccagccgtttctgatggacttggaaggaaagcaaggcaactttaagaacctcagggagttcgtattcaaaaatatagacggttacttcaagatttactcaaaacatacacctatcaacttggtccgagatctcccacaaggtttttcagcgctcgagccattggtggacctgcccatcggaatcaacattacccgattccagacactgcttgcactgcaccggagttatctcacacccggcgacagctcgtctggttggacggcgggagctgccgcttactatgtcggttacttgcaacctcggacatttcttctgaagtataacgaaaacggtacgatcaccgatgccgtagactgcgctctcgatcccctttcagagacgaagtgcacgctcaaatcatttactgtggaaaaaggaatttatcaaacgagcaatttcagggtgcaacccacggagtccatcgtacgattcccaaacataacaaatctttgcccgtttggcgaggtttttaatgctacgcgctttgcatcagtgtacgcttggaataggaaacgaatctcaaattgtgttgcggattattccgtgttgtataattccgcaagcttctccacctttaaatgttatggcgtgtcccccacaaaacttaacgatctttgctttacaaatgtctatgcggattcattcgttatccgaggggatgaagtgcgacaaatcgctcctgggcagacagggaagatagctgattacaattacaaacttccagacgattttacaggatgtgtaatcgcgtggaactcaaacaatttggacagtaaggttggtggcaactacaattatctgtatagacttttcagaaaaagtaacctcaaacctttcgaacgcgacattagcactgagatataccaggccggatcaactccttgtaacggtgttgaaggtttcaactgttactttccgctccaatcctacggctttcaaccaacgaacggtgtcgggtaccaaccatacagagttgtcgtcttgagttttgagcttttgcacgcacctgcaaccgtgtgtggtccgaagaaaagtactaatctggttaaaaataaatgcgtcaatttcaactttaatgggttgacgggcacaggcgtgctgacagagtccaataaaaagtttttgccctttcagcagtttgggagggacatcgccgatacgaccgatgccgtccgagatcctcaaacccttgaaatattggacattaccccctgtagttttggcggtgtaagtgtgattactcccggaacgaatacatctaaccaggtagcggtgctttatcaagatgtcaactgtacagaggtccccgtggcgattcacgccgatcagttgacacccacatggagggtttacagcacaggatccaacgtcttccagacgagagcaggatgcttgatcggtgccgagcatgtgaataacagctacgaatgtgacattccgattggtgctggaatctgcgcaagttaccaaactcaaacgaattcccctggctccgcctcctctgtggcatcccagtctataatcgcgtatacgatgtcactgggcgccgagaattctgtcgcatatagcaacaactccatcgcaatacccacaaattttacaatttctgtgaccacggaaattctgcccgtcagcatgacaaaaactagcgtggactgcacgatgtatatctgcggcgactccacagagtgttccaacctcctcttgcaatatggcagcttttgcacacaattgaaccgagcgctcaccgggatagcggtcgagcaagataagaatacccaagaggtgtttgcccaggtgaagcaaatctataagacccctccaataaaggattttggcggcttcaatttctcacaaattttgcccgatccatctaagccgtccaagcgatcatttattgaggatctgctgttcaacaaagtcactctcgccgacgcggggtttattaaacaatatggcgattgcctgggcgacatcgccgccagggaccttatatgcgcccagaagttcaacggtctcaccgtgctgccaccattgttgactgacgaaatgatcgcacagtatacgtcagcgctgctggctggtaccattacttctggctggacattcggagccggtgcagcccttcagattccatttgcaatgcagatggcctatagatttaatggaataggagtgacgcagaacgtattgtacgagaatcaaaagttgatcgcaaaccagttcaattctgccattggaaagatacaagattccctttcttctaccgcctcagccctgggtaagttgcaagatgtcgtcaaccaaaatgcacaggctttgaataccttggtaaaacaattgtcatccaatttcggcgccataagctcagtacttaacgatatcttgtcacgattggatccccccgaagccgaggtccaaatcgataggctcatcacgggacggctccagagccttcaaacctatgtgacgcaacaactgatacgggccgcagaaatccgagcgtccgccaacttggcagctaccaagatgtccgaatgtgtactgggtcaatcaaagagagttgatttctgtggaaaaggataccatctcatgtcattcccccaaagcgccccgcacggcgtcgtgttcctccatgtgacttacgttccagcacaagaaaaaaacttcacaactgcgcccgctatctgccatgacgggaaggcgcacttcccacgagagggtgtatttgtgtcaaatggaacgcactggttcgtaacgcaaaggaacttctatgaaccgcagataatcacgactgacaacacttttgtatctggcaattgtgatgtggtcatcgggatagttaacaacactgtctatgacccgctgcaacccgagcttgattcatttaaagaagaactcgataaatatttcaagaatcacaccagtcccgatgtggaccttggagacatttccgggataaatgcctctgtggtaaacatccaaaaggaaatcgatcggctgaatgaagtggccaaaaacttgaacgaaagtctgatagaccttcaggagctcgggaagtatgaacaatacataaagtggccatggtacatctggcttgggttcatcgctggcctcatagccatcgttatggttaccatcatgctctgctgtatgacttcctgttgttcctgtctcaaagggtgttgcagctgtggtagctgctgcaaatttgacgaggatgactcagaacccgtcttgaagggagtcaagttgcactacacttagtgataa

SEQ ID NO: 107 - DNA, 3834 bp, Artificial Sequence
  Description of Artificial Sequence: Synthetic polynucleotide
  pKL034
atgtaccgaatgcagctcttgtcctgcattgctctcagccttgcacttgtgaccaattccactacccgcacacagctcccgccggcgtacactaactccttcacccggggggtttactacccggacaaagtgttccgcagcagtgtcctgcattcaacacaagatttgttccttccattctttagcaatgtcacttggttccatgctatacacgtgagtggcactaacggcactaagcgcttcgataacccggttctgccgtttaatgatggcgtttacttcgcaagtactgagaaatcaaacattatacgggggtggatattcggtactacattggatagtaaaactcaaagccttttgattgtcaacaatgcaactaatgtagtcataaaagtttgtgaattccaattctgtaacgatccctttcttggtgtgtattaccacaagaataacaaatcatggatggagtctgaatttcgagtatacagtagcgccaataattgcacgtttgagtatgtaagccagccgtttctgatggacttggaaggaaagcaaggcaactttaagaacctcagggagttcgtattcaaaaatatagacggttacttcaagatttactcaaaacatacacctatcaacttggtccgagatctcccacaaggtttttcagcgctcgagccattggtggacctgcccatcggaatcaacattacccgattccagacactgcttgcactgcaccggagttatctcacacccggcgacagctcgtctggttggacggcgggagctgccgcttactatgtcggttacttgcaacctcggacatttcttctgaagtataacgaaaacggtacgatcaccgatgccgtagactgcgctctcgatcccctttcagagacgaagtgcacgctcaaatcatttactgtggaaaaaggaatttatcaaacgagcaatttcagggtgcaacccacggagtccatcgtacgattcccaaacataacaaatctttgcccgtttggcgaggtttttaatgctacgcgctttgcatcagtgtacgcttggaataggaaacgaatctcaaattgtgttgcggattattccgtgttgtataattccgcaagcttctccacctttaaatgttatggcgtgtcccccacaaaacttaacgatctttgctttacaaatgtctatgcggattcattcgttatccgaggggatgaagtgcgacaaatcgctcctgggcagacagggaagatagctgattacaattacaaacttccagacgattttacaggatgtgtaatcgcgtggaactcaaacaatttggacagtaaggttggtggcaactacaattatctgtatagacttttcagaaaaagtaacctcaaacctttcgaacgcgacattagcactgagatataccaggccggatcaactccttgtaacggtgttgaaggtttcaactgttactttccgctccaatcctacggctttcaaccaacgaacggtgtcgggtaccaaccatacagagttgtcgtcttgagttttgagcttttgcacgcacctgcaaccgtgtgtggtccgaagaaaagtactaatctggttaaaaataaatgcgtcaatttcaactttaatgggttgacgggcacaggcgtgctgacagagtccaataaaaagtttttgccctttcagcagtttgggagggacatcgccgatacgaccgatgccgtccgagatcctcaaacccttgaaatattggacattaccccctgtagttttggcggtgtaagtgtgattactcccggaacgaatacatctaaccaggtagcggtgctttatcaagatgtcaactgtacagaggtccccgtggcgattcacgccgatcagttgacacccacatggagggtttacagcacaggatccaacgtcttccagacgagagcaggatgcttgatcggtgccgagcatgtgaataacagctacgaatgtgacattccgattggtgctggaatctgcgcaagttaccaaactcaaacgaattcccctggctccgcctcctctgtggcatcccagtctataatcgcgtatacgatgtcactgggcgccgagaattctgtcgcatatagcaacaactccatcgcaatacccacaaattttacaatttctgtgaccacggaaattctgcccgtcagcatgacaaaaactagcgtggactgcacgatgtatatctgcggcgactccacagagtgttccaacctcctcttgcaatatggcagcttttgcacacaattgaaccgagcgctcaccgggatagcggtcgagcaagataagaatacccaagaggtgtttgcccaggtgaagcaaatctataagacccctccaataaaggattttggcggcttcaatttctcacaaattttgcccgatccatctaagccgtccaagcgatcatttattgaggatctgctgttcaacaaagtcactctcgccgacgcggggtttattaaacaatatggcgattgcctgggcgacatcgccgccagggaccttatatgcgcccagaagttcaacggtctcaccgtgctgccaccattgttgactgacgaaatgatcgcacagtatacgtcagcgctgctggctggtaccattacttctggctggacattcggagccggtgcagcccttcagattccatttgcaatgcagatggcctatagatttaatggaataggagtgacgcagaacgtattgtacgagaatcaaaagttgatcgcaaaccagttcaattctgccattggaaagatacaagattccctttcttctaccgcctcagccctgggtaagttgcaagatgtcgtcaaccaaaatgcacaggctttgaataccttggtaaaacaattgtcatccaatttcggcgccataagctcagtacttaacgatatcttgtcacgattggatccccccgaagccgaggtccaaatcgataggctcatcacgggacggctccagagccttcaaacctatgtgacgcaacaactgatacgggccgcagaaatccgagcgtccgccaacttggcagctaccaagatgtccgaatgtgtactgggtcaatcaaagagagttgatttctgtggaaaaggataccatctcatgtcattcccccaaagcgccccgcacggcgtcgtgttcctccatgtgacttacgttccagcacaagaaaaaaacttcacaactgcgcccgctatctgccatgacgggaaggcgcacttcccacgagagggtgtatttgtgtcaaatggaacgcactggttcgtaacgcaaaggaacttctatgaaccgcagataatcacgactgacaacacttttgtatctggcaattgtgatgtggtcatcgggatagttaacaacactgtctatgacccgctgcaacccgagcttgattcatttaaagaagaactcgataaatatttcaagaatcacaccagtcccgatgtggaccttggagacatttccgggataaatgcctctgtggtaaacatccaaaaggaaatcgatcggctgaatgaagtggccaaaaacttgaacgaaagtctgatagaccttcaggagctcgggaagtatgaacaatacataaagtggccatggtacatctggcttgggttcatcgctggcctcatagccatcgttatggttaccatcatgctctgctgtatgacttcctgttgttcctgtctcaaagggtgttgcagctgtggtagctgctgcaaatttgacgaggatgactcagaacccgtcttgaagggagtcaagttgcactacacttagtgataa

SEQ ID NO: 108 - DNA, 3834 bp, Artificial Sequence
  Description of Artificial Sequence: Synthetic polynucleotide
  pKL035
atggattggacgtggatactgttccttgtggctgcagccactcgcgttcactcaaacttgactacccgcacacagctcccgccggcgtacactaactccttcacccggggggtttactacccggacaaagtgttccgcagcagtgtcctgcattcaacacaagatttgttccttccattctttagcaatgtcacttggttccatgctatacacgtgagtggcactaacggcactaagcgcttcgataacccggttctgccgtttaatgatggcgtttacttcgcaagtactgagaaatcaaacattatacgggggtggatattcggtactacattggatagtaaaactcaaagccttttgattgtcaacaatgcaactaatgtagtcataaaagtttgtgaattccaattctgtaacgatccctttcttggtgtgtattaccacaagaataacaaatcatggatggagtctgaatttcgagtatacagtagcgccaataattgcacgtttgagtatgtaagccagccgtttctgatggacttggaaggaaagcaaggcaactttaagaacctcagggagttcgtattcaaaaatatagacggttacttcaagatttactcaaaacatacacctatcaacttggtccgagatctcccacaaggtttttcagcgctcgagccattggtggacctgcccatcggaatcaacattacccgattccagacactgcttgcactgcaccggagttatctcacacccggcgacagctcgtctggttggacggcgggagctgccgcttactatgtcggttacttgcaacctcggacatttcttctgaagtataacgaaaacggtacgatcaccgatgccgtagactgcgctctcgatcccctttcagagacgaagtgcacgctcaaatcatttactgtggaaaaaggaatttatcaaacgagcaatttcagggtgcaacccacggagtccatcgtacgattcccaaacataacaaatctttgcccgtttggcgaggtttttaatgctacgcgctttgcatcagtgtacgcttggaataggaaacgaatctcaaattgtgttgcggattattccgtgttgtataattccgcaagcttctccacctttaaatgttatggcgtgtcccccacaaaacttaacgatctttgctttacaaatgtctatgcggattcattcgttatccgaggggatgaagtgcgacaaatcgctcctgggcagacagggaagatagctgattacaattacaaacttccagacgattttacaggatgtgtaatcgcgtggaactcaaacaatttggacagtaaggttggtggcaactacaattatctgtatagacttttcagaaaaagtaacctcaaacctttcgaacgcgacattagcactgagatataccaggccggatcaactccttgtaacggtgttgaaggtttcaactgttactttccgctccaatcctacggctttcaaccaacgaacggtgtcgggtaccaaccatacagagttgtcgtcttgagttttgagcttttgcacgcacctgcaaccgtgtgtggtccgaagaaaagtactaatctggttaaaaataaatgcgtcaatttcaactttaatgggttgacgggcacaggcgtgctgacagagtccaataaaaagtttttgccctttcagcagtttgggagggacatcgccgatacgaccgatgccgtccgagatcctcaaacccttgaaatattggacattaccccctgtagttttggcggtgtaagtgtgattactcccggaacgaatacatctaaccaggtagcggtgctttatcaagatgtcaactgtacagaggtccccgtggcgattcacgccgatcagttgacacccacatggagggtttacagcacaggatccaacgtcttccagacgagagcaggatgcttgatcggtgccgagcatgtgaataacagctacgaatgtgacattccgattggtgctggaatctgcgcaagttaccaaactcaaacgaattcccctggctccgcctcctctgtggcatcccagtctataatcgcgtatacgatgtcactgggcgccgagaattctgtcgcatatagcaacaactccatcgcaatacccacaaattttacaatttctgtgaccacggaaattctgcccgtcagcatgacaaaaactagcgtggactgcacgatgtatatctgcggcgactccacagagtgttccaacctcctcttgcaatatggcagcttttgcacacaattgaaccgagcgctcaccgggatagcggtcgagcaagataagaatacccaagaggtgtttgcccaggtgaagcaaatctataagacccctccaataaaggattttggcggcttcaatttctcacaaattttgcccgatccatctaagccgtccaagcgatcatttattgaggatctgctgttcaacaaagtcactctcgccgacgcggggtttattaaacaatatggcgattgcctgggcgacatcgccgccagggaccttatatgcgcccagaagttcaacggtctcaccgtgctgccaccattgttgactgacgaaatgatcgcacagtatacgtcagcgctgctggctggtaccattacttctggctggacattcggagccggtgcagcccttcagattccatttgcaatgcagatggcctatagatttaatggaataggagtgacgcagaacgtattgtacgagaatcaaaagttgatcgcaaaccagttcaattctgccattggaaagatacaagattccctttcttctaccgcctcagccctgggtaagttgcaagatgtcgtcaaccaaaatgcacaggctttgaataccttggtaaaacaattgtcatccaatttcggcgccataagctcagtacttaacgatatcttgtcacgattggatccccccgaagccgaggtccaaatcgataggctcatcacgggacggctccagagccttcaaacctatgtgacgcaacaactgatacgggccgcagaaatccgagcgtccgccaacttggcagctaccaagatgtccgaatgtgtactgggtcaatcaaagagagttgatttctgtggaaaaggataccatctcatgtcattcccccaaagcgccccgcacggcgtcgtgttcctccatgtgacttacgttccagcacaagaaaaaaacttcacaactgcgcccgctatctgccatgacgggaaggcgcacttcccacgagagggtgtatttgtgtcaaatggaacgcactggttcgtaacgcaaaggaacttctatgaaccgcagataatcacgactgacaacacttttgtatctggcaattgtgatgtggtcatcgggatagttaacaacactgtctatgacccgctgcaacccgagcttgattcatttaaagaagaactcgataaatatttcaagaatcacaccagtcccgatgtggaccttggagacatttccgggataaatgcctctgtggtaaacatccaaaaggaaatcgatcggctgaatgaagtggccaaaaacttgaacgaaagtctgatagaccttcaggagctcgggaagtatgaacaatacataaagtggccatggtacatctggcttgggttcatcgctggcctcatagccatcgttatggttaccatcatgctctgctgtatgacttcctgttgttcctgtctcaaagggtgttgcagctgtggtagctgctgcaaatttgacgaggatgactcagaacccgtcttgaagggagtcaagttgcactacacttagtgataa

SEQ ID NO: 109 - DNA, 3828 bp, Artificial Sequence
  Description of Artificial Sequence: Synthetic polynucleotide
  pKL036
atggattggacgtggatactgttccttgtggctgcagccactcgcgttcactcaactacccgcacacagctcccgccggcgtacactaactccttcacccggggggtttactacccggacaaagtgttccgcagcagtgtcctgcattcaacacaagatttgttccttccattctttagcaatgtcacttggttccatgctatacacgtgagtggcactaacggcactaagcgcttcgataacccggttctgccgtttaatgatggcgtttacttcgcaagtactgagaaatcaaacattatacgggggtggatattcggtactacattggatagtaaaactcaaagccttttgattgtcaacaatgcaactaatgtagtcataaaagtttgtgaattccaattctgtaacgatccctttcttggtgtgtattaccacaagaataacaaatcatggatggagtctgaatttcgagtatacagtagcgccaataattgcacgtttgagtatgtaagccagccgtttctgatggacttggaaggaaagcaaggcaactttaagaacctcagggagttcgtattcaaaaatatagacggttacttcaagatttactcaaaacatacacctatcaacttggtccgagatctcccacaaggtttttcagcgctcgagccattggtggacctgcccatcggaatcaacattacccgattccagacactgcttgcactgcaccggagttatctcacacccggcgacagctcgtctggttggacggcgggagctgccgcttactatgtcggttacttgcaacctcggacatttcttctgaagtataacgaaaacggtacgatcaccgatgccgtagactgcgctctcgatcccctttcagagacgaagtgcacgctcaaatcatttactgtggaaaaaggaatttatcaaacgagcaatttcagggtgcaacccacggagtccatcgtacgattcccaaacataacaaatctttgcccgtttggcgaggtttttaatgctacgcgctttgcatcagtgtacgcttggaataggaaacgaatctcaaattgtgttgcggattattccgtgttgtataattccgcaagcttctccacctttaaatgttatggcgtgtcccccacaaaacttaacgatctttgctttacaaatgtctatgcggattcattcgttatccgaggggatgaagtgcgacaaatcgctcctgggcagacagggaagatagctgattacaattacaaacttccagacgattttacaggatgtgtaatcgcgtggaactcaaacaatttggacagtaaggttggtggcaactacaattatctgtatagacttttcagaaaaagtaacctcaaacctttcgaacgcgacattagcactgagatataccaggccggatcaactccttgtaacggtgttgaaggtttcaactgttactttccgctccaatcctacggctttcaaccaacgaacggtgtcgggtaccaaccatacagagttgtcgtcttgagttttgagcttttgcacgcacctgcaaccgtgtgtggtccgaagaaaagtactaatctggttaaaaataaatgcgtcaatttcaactttaatgggttgacgggcacaggcgtgctgacagagtccaataaaaagtttttgccctttcagcagtttgggagggacatcgccgatacgaccgatgccgtccgagatcctcaaacccttgaaatattggacattaccccctgtagttttggcggtgtaagtgtgattactcccggaacgaatacatctaaccaggtagcggtgctttatcaagatgtcaactgtacagaggtccccgtggcgattcacgccgatcagttgacacccacatggagggtttacagcacaggatccaacgtcttccagacgagagcaggatgcttgatcggtgccgagcatgtgaataacagctacgaatgtgacattccgattggtgctggaatctgcgcaagttaccaaactcaaacgaattcccctggctccgcctcctctgtggcatcccagtctataatcgcgtatacgatgtcactgggcgccgagaattctgtcgcatatagcaacaactccatcgcaatacccacaaattttacaatttctgtgaccacggaaattctgcccgtcagcatgacaaaaactagcgtggactgcacgatgtatatctgcggcgactccacagagtgttccaacctcctcttgcaatatggcagcttttgcacacaattgaaccgagcgctcaccgggatagcggtcgagcaagataagaatacccaagaggtgtttgcccaggtgaagcaaatctataagacccctccaataaaggattttggcggcttcaatttctcacaaattttgcccgatccatctaagccgtccaagcgatcatttattgaggatctgctgttcaacaaagtcactctcgccgacgcggggtttattaaacaatatggcgattgcctgggcgacatcgccgccagggaccttatatgcgcccagaagttcaacggtctcaccgtgctgccaccattgttgactgacgaaatgatcgcacagtatacgtcagcgctgctggctggtaccattacttctggctggacattcggagccggtgcagcccttcagattccatttgcaatgcagatggcctatagatttaatggaataggagtgacgcagaacgtattgtacgagaatcaaaagttgatcgcaaaccagttcaattctgccattggaaagatacaagattccctttcttctaccgcctcagccctgggtaagttgcaagatgtcgtcaaccaaaatgcacaggctttgaataccttggtaaaacaattgtcatccaatttcggcgccataagctcagtacttaacgatatcttgtcacgattggatccccccgaagccgaggtccaaatcgataggctcatcacgggacggctccagagccttcaaacctatgtgacgcaacaactgatacgggccgcagaaatccgagcgtccgccaacttggcagctaccaagatgtccgaatgtgtactgggtcaatcaaagagagttgatttctgtggaaaaggataccatctcatgtcattcccccaaagcgccccgcacggcgtcgtgttcctccatgtgacttacgttccagcacaagaaaaaaacttcacaactgcgcccgctatctgccatgacgggaaggcgcacttcccacgagagggtgtatttgtgtcaaatggaacgcactggttcgtaacgcaaaggaacttctatgaaccgcagataatcacgactgacaacacttttgtatctggcaattgtgatgtggtcatcgggatagttaacaacactgtctatgacccgctgcaacccgagcttgattcatttaaagaagaactcgataaatatttcaagaatcacaccagtcccgatgtggaccttggagacatttccgggataaatgcctctgtggtaaacatccaaaaggaaatcgatcggctgaatgaagtggccaaaaacttgaacgaaagtctgatagaccttcaggagctcgggaagtatgaacaatacataaagtggccatggtacatctggcttgggttcatcgctggcctcatagccatcgttatggttaccatcatgctctgctgtatgacttcctgttgttcctgtctcaaagggtgttgcagctgtggtagctgctgcaaatttgacgaggatgactcagaacccgtcttgaagggagtcaagttgcactacacttagtgataa

SEQ ID NO: 110 - DNA, 3840 bp, Artificial Sequence
  Description of Artificial Sequence: Synthetic polynucleotide
  pKL037
atggaaactcctgcggagttgctgttccttctgcttctttggctccctgatacaacgggaaacttgactacccgcacacagctcccgccggcgtacactaactccttcacccggggggtttactacccggacaaagtgttccgcagcagtgtcctgcattcaacacaagatttgttccttccattctttagcaatgtcacttggttccatgctatacacgtgagtggcactaacggcactaagcgcttcgataacccggttctgccgtttaatgatggcgtttacttcgcaagtactgagaaatcaaacattatacgggggtggatattcggtactacattggatagtaaaactcaaagccttttgattgtcaacaatgcaactaatgtagtcataaaagtttgtgaattccaattctgtaacgatccctttcttggtgtgtattaccacaagaataacaaatcatggatggagtctgaatttcgagtatacagtagcgccaataattgcacgtttgagtatgtaagccagccgtttctgatggacttggaaggaaagcaaggcaactttaagaacctcagggagttcgtattcaaaaatatagacggttacttcaagatttactcaaaacatacacctatcaacttggtccgagatctcccacaaggtttttcagcgctcgagccattggtggacctgcccatcggaatcaacattacccgattccagacactgcttgcactgcaccggagttatctcacacccggcgacagctcgtctggttggacggcgggagctgccgcttactatgtcggttacttgcaacctcggacatttcttctgaagtataacgaaaacggtacgatcaccgatgccgtagactgcgctctcgatcccctttcagagacgaagtgcacgctcaaatcatttactgtggaaaaaggaatttatcaaacgagcaatttcagggtgcaacccacggagtccatcgtacgattcccaaacataacaaatctttgcccgtttggcgaggtttttaatgctacgcgctttgcatcagtgtacgcttggaataggaaacgaatctcaaattgtgttgcggattattccgtgttgtataattccgcaagcttctccacctttaaatgttatggcgtgtcccccacaaaacttaacgatctttgctttacaaatgtctatgcggattcattcgttatccgaggggatgaagtgcgacaaatcgctcctgggcagacagggaagatagctgattacaattacaaacttccagacgattttacaggatgtgtaatcgcgtggaactcaaacaatttggacagtaaggttggtggcaactacaattatctgtatagacttttcagaaaaagtaacctcaaacctttcgaacgcgacattagcactgagatataccaggccggatcaactccttgtaacggtgttgaaggtttcaactgttactttccgctccaatcctacggctttcaaccaacgaacggtgtcgggtaccaaccatacagagttgtcgtcttgagttttgagcttttgcacgcacctgcaaccgtgtgtggtccgaagaaaagtactaatctggttaaaaataaatgcgtcaatttcaactttaatgggttgacgggcacaggcgtgctgacagagtccaataaaaagtttttgccctttcagcagtttgggagggacatcgccgatacgaccgatgccgtccgagatcctcaaacccttgaaatattggacattaccccctgtagttttggcggtgtaagtgtgattactcccggaacgaatacatctaaccaggtagcggtgctttatcaagatgtcaactgtacagaggtccccgtggcgattcacgccgatcagttgacacccacatggagggtttacagcacaggatccaacgtcttccagacgagagcaggatgcttgatcggtgccgagcatgtgaataacagctacgaatgtgacattccgattggtgctggaatctgcgcaagttaccaaactcaaacgaattcccctggctccgcctcctctgtggcatcccagtctataatcgcgtatacgatgtcactgggcgccgagaattctgtcgcatatagcaacaactccatcgcaatacccacaaattttacaatttctgtgaccacggaaattctgcccgtcagcatgacaaaaactagcgtggactgcacgatgtatatctgcggcgactccacagagtgttccaacctcctcttgcaatatggcagcttttgcacacaattgaaccgagcgctcaccgggatagcggtcgagcaagataagaatacccaagaggtgtttgcccaggtgaagcaaatctataagacccctccaataaaggattttggcggcttcaatttctcacaaattttgcccgatccatctaagccgtccaagcgatcatttattgaggatctgctgttcaacaaagtcactctcgccgacgcggggtttattaaacaatatggcgattgcctgggcgacatcgccgccagggaccttatatgcgcccagaagttcaacggtctcaccgtgctgccaccattgttgactgacgaaatgatcgcacagtatacgtcagcgctgctggctggtaccattacttctggctggacattcggagccggtgcagcccttcagattccatttgcaatgcagatggcctatagatttaatggaataggagtgacgcagaacgtattgtacgagaatcaaaagttgatcgcaaaccagttcaattctgccattggaaagatacaagattccctttcttctaccgcctcagccctgggtaagttgcaagatgtcgtcaaccaaaatgcacaggctttgaataccttggtaaaacaattgtcatccaatttcggcgccataagctcagtacttaacgatatcttgtcacgattggatccccccgaagccgaggtccaaatcgataggctcatcacgggacggctccagagccttcaaacctatgtgacgcaacaactgatacgggccgcagaaatccgagcgtccgccaacttggcagctaccaagatgtccgaatgtgtactgggtcaatcaaagagagttgatttctgtggaaaaggataccatctcatgtcattcccccaaagcgccccgcacggcgtcgtgttcctccatgtgacttacgttccagcacaagaaaaaaacttcacaactgcgcccgctatctgccatgacgggaaggcgcacttcccacgagagggtgtatttgtgtcaaatggaacgcactggttcgtaacgcaaaggaacttctatgaaccgcagataatcacgactgacaacacttttgtatctggcaattgtgatgtggtcatcgggatagttaacaacactgtctatgacccgctgcaacccgagcttgattcatttaaagaagaactcgataaatatttcaagaatcacaccagtcccgatgtggaccttggagacatttccgggataaatgcctctgtggtaaacatccaaaaggaaatcgatcggctgaatgaagtggccaaaaacttgaacgaaagtctgatagaccttcaggagctcgggaagtatgaacaatacataaagtggccatggtacatctggcttgggttcatcgctggcctcatagccatcgttatggttaccatcatgctctgctgtatgacttcctgttgttcctgtctcaaagggtgttgcagctgtggtagctgctgcaaatttgacgaggatgactcagaacccgtcttgaagggagtcaagttgcactacacttagtgataa

SEQ ID NO: 111 - DNA, 3834 bp, Artificial Sequence
  Description of Artificial Sequence: Synthetic polynucleotide
  pKL038
atggaaactcctgcggagttgctgttccttctgcttctttggctccctgatacaacgggaactacccgcacacagctcccgccggcgtacactaactccttcacccggggggtttactacccggacaaagtgttccgcagcagtgtcctgcattcaacacaagatttgttccttccattctttagcaatgtcacttggttccatgctatacacgtgagtggcactaacggcactaagcgcttcgataacccggttctgccgtttaatgatggcgtttacttcgcaagtactgagaaatcaaacattatacgggggtggatattcggtactacattggatagtaaaactcaaagccttttgattgtcaacaatgcaactaatgtagtcataaaagtttgtgaattccaattctgtaacgatccctttcttggtgtgtattaccacaagaataacaaatcatggatggagtctgaatttcgagtatacagtagcgccaataattgcacgtttgagtatgtaagccagccgtttctgatggacttggaaggaaagcaaggcaactttaagaacctcagggagttcgtattcaaaaatatagacggttacttcaagatttactcaaaacatacacctatcaacttggtccgagatctcccacaaggtttttcagcgctcgagccattggtggacctgcccatcggaatcaacattacccgattccagacactgcttgcactgcaccggagttatctcacacccggcgacagctcgtctggttggacggcgggagctgccgcttactatgtcggttacttgcaacctcggacatttcttctgaagtataacgaaaacggtacgatcaccgatgccgtagactgcgctctcgatcccctttcagagacgaagtgcacgctcaaatcatttactgtggaaaaaggaatttatcaaacgagcaatttcagggtgcaacccacggagtccatcgtacgattcccaaacataacaaatctttgcccgtttggcgaggtttttaatgctacgcgctttgcatcagtgtacgcttggaataggaaacgaatctcaaattgtgttgcggattattccgtgttgtataattccgcaagcttctccacctttaaatgttatggcgtgtcccccacaaaacttaacgatctttgctttacaaatgtctatgcggattcattcgttatccgaggggatgaagtgcgacaaatcgctcctgggcagacagggaagatagctgattacaattacaaacttccagacgattttacaggatgtgtaatcgcgtggaactcaaacaatttggacagtaaggttggtggcaactacaattatctgtatagacttttcagaaaaagtaacctcaaacctttcgaacgcgacattagcactgagatataccaggccggatcaactccttgtaacggtgttgaaggtttcaactgttactttccgctccaatcctacggctttcaaccaacgaacggtgtcgggtaccaaccatacagagttgtcgtcttgagttttgagcttttgcacgcacctgcaaccgtgtgtggtccgaagaaaagtactaatctggttaaaaataaatgcgtcaatttcaactttaatgggttgacgggcacaggcgtgctgacagagtccaataaaaagtttttgccctttcagcagtttgggagggacatcgccgatacgaccgatgccgtccgagatcctcaaacccttgaaatattggacattaccccctgtagttttggcggtgtaagtgtgattactcccggaacgaatacatctaaccaggtagcggtgctttatcaagatgtcaactgtacagaggtccccgtggcgattcacgccgatcagttgacacccacatggagggtttacagcacaggatccaacgtcttccagacgagagcaggatgcttgatcggtgccgagcatgtgaataacagctacgaatgtgacattccgattggtgctggaatctgcgcaagttaccaaactcaaacgaattcccctggctccgcctcctctgtggcatcccagtctataatcgcgtatacgatgtcactgggcgccgagaattctgtcgcatatagcaacaactccatcgcaatacccacaaattttacaatttctgtgaccacggaaattctgcccgtcagcatgacaaaaactagcgtggactgcacgatgtatatctgcggcgactccacagagtgttccaacctcctcttgcaatatggcagcttttgcacacaattgaaccgagcgctcaccgggatagcggtcgagcaagataagaatacccaagaggtgtttgcccaggtgaagcaaatctataagacccctccaataaaggattttggcggcttcaatttctcacaaattttgcccgatccatctaagccgtccaagcgatcatttattgaggatctgctgttcaacaaagtcactctcgccgacgcggggtttattaaacaatatggcgattgcctgggcgacatcgccgccagggaccttatatgcgcccagaagttcaacggtctcaccgtgctgccaccattgttgactgacgaaatgatcgcacagtatacgtcagcgctgctggctggtaccattacttctggctggacattcggagccggtgcagcccttcagattccatttgcaatgcagatggcctatagatttaatggaataggagtgacgcagaacgtattgtacgagaatcaaaagttgatcgcaaaccagttcaattctgccattggaaagatacaagattccctttcttctaccgcctcagccctgggtaagttgcaagatgtcgtcaaccaaaatgcacaggctttgaataccttggtaaaacaattgtcatccaatttcggcgccataagctcagtacttaacgatatcttgtcacgattggatccccccgaagccgaggtccaaatcgataggctcatcacgggacggctccagagccttcaaacctatgtgacgcaacaactgatacgggccgcagaaatccgagcgtccgccaacttggcagctaccaagatgtccgaatgtgtactgggtcaatcaaagagagttgatttctgtggaaaaggataccatctcatgtcattcccccaaagcgccccgcacggcgtcgtgttcctccatgtgacttacgttccagcacaagaaaaaaacttcacaactgcgcccgctatctgccatgacgggaaggcgcacttcccacgagagggtgtatttgtgtcaaatggaacgcactggttcgtaacgcaaaggaacttctatgaaccgcagataatcacgactgacaacacttttgtatctggcaattgtgatgtggtcatcgggatagttaacaacactgtctatgacccgctgcaacccgagcttgattcatttaaagaagaactcgataaatatttcaagaatcacaccagtcccgatgtggaccttggagacatttccgggataaatgcctctgtggtaaacatccaaaaggaaatcgatcggctgaatgaagtggccaaaaacttgaacgaaagtctgatagaccttcaggagctcgggaagtatgaacaatacataaagtggccatggtacatctggcttgggttcatcgctggcctcatagccatcgttatggttaccatcatgctctgctgtatgacttcctgttgttcctgtctcaaagggtgttgcagctgtggtagctgctgcaaatttgacgaggatgactcagaacccgtcttgaagggagtcaagttgcactacacttagtgataa

SEQ ID NO: 112 - DNA, 3843 bp, Artificial Sequence
  Description of Artificial Sequence: Synthetic polynucleotide
  pKL039
atgaacgaggggtccatcatgtggctcgcgtccttggccgttgtgattgcatgtgccggagctaacttgactacccgcacacagctcccgccggcgtacactaactccttcacccggggggtttactacccggacaaagtgttccgcagcagtgtcctgcattcaacacaagatttgttccttccattctttagcaatgtcacttggttccatgctatacacgtgagtggcactaacggcactaagcgcttcgataacccggttctgccgtttaatgatggcgtttacttcgcaagtactgagaaatcaaacattatacgggggtggatattcggtactacattggatagtaaaactcaaagccttttgattgtcaacaatgcaactaatgtagtcataaaagtttgtgaattccaattctgtaacgatccctttcttggtgtgtattaccacaagaataacaaatcatggatggagtctgaatttcgagtatacagtagcgccaataattgcacgtttgagtatgtaagccagccgtttctgatggacttggaaggaaagcaaggcaactttaagaacctcagggagttcgtattcaaaaatatagacggttacttcaagatttactcaaaacatacacctatcaacttggtccgagatctcccacaaggtttttcagcgctcgagccattggtggacctgcccatcggaatcaacattacccgattccagacactgcttgcactgcaccggagttatctcacacccggcgacagctcgtctggttggacggcgggagctgccgcttactatgtcggttacttgcaacctcggacatttcttctgaagtataacgaaaacggtacgatcaccgatgccgtagactgcgctctcgatcccctttcagagacgaagtgcacgctcaaatcatttactgtggaaaaaggaatttatcaaacgagcaatttcagggtgcaacccacggagtccatcgtacgattcccaaacataacaaatctttgcccgtttggcgaggtttttaatgctacgcgctttgcatcagtgtacgcttggaataggaaacgaatctcaaattgtgttgcggattattccgtgttgtataattccgcaagcttctccacctttaaatgttatggcgtgtcccccacaaaacttaacgatctttgctttacaaatgtctatgcggattcattcgttatccgaggggatgaagtgcgacaaatcgctcctgggcagacagggaagatagctgattacaattacaaacttccagacgattttacaggatgtgtaatcgcgtggaactcaaacaatttggacagtaaggttggtggcaactacaattatctgtatagacttttcagaaaaagtaacctcaaacctttcgaacgcgacattagcactgagatataccaggccggatcaactccttgtaacggtgttgaaggtttcaactgttactttccgctccaatcctacggctttcaaccaacgaacggtgtcgggtaccaaccatacagagttgtcgtcttgagttttgagcttttgcacgcacctgcaaccgtgtgtggtccgaagaaaagtactaatctggttaaaaataaatgcgtcaatttcaactttaatgggttgacgggcacaggcgtgctgacagagtccaataaaaagtttttgccctttcagcagtttgggagggacatcgccgatacgaccgatgccgtccgagatcctcaaacccttgaaatattggacattaccccctgtagttttggcggtgtaagtgtgattactcccggaacgaatacatctaaccaggtagcggtgctttatcaagatgtcaactgtacagaggtccccgtggcgattcacgccgatcagttgacacccacatggagggtttacagcacaggatccaacgtcttccagacgagagcaggatgcttgatcggtgccgagcatgtgaataacagctacgaatgtgacattccgattggtgctggaatctgcgcaagttaccaaactcaaacgaattcccctggctccgcctcctctgtggcatcccagtctataatcgcgtatacgatgtcactgggcgccgagaattctgtcgcatatagcaacaactccatcgcaatacccacaaattttacaatttctgtgaccacggaaattctgcccgtcagcatgacaaaaactagcgtggactgcacgatgtatatctgcggcgactccacagagtgttccaacctcctcttgcaatatggcagcttttgcacacaattgaaccgagcgctcaccgggatagcggtcgagcaagataagaatacccaagaggtgtttgcccaggtgaagcaaatctataagacccctccaataaaggattttggcggcttcaatttctcacaaattttgcccgatccatctaagccgtccaagcgatcatttattgaggatctgctgttcaacaaagtcactctcgccgacgcggggtttattaaacaatatggcgattgcctgggcgacatcgccgccagggaccttatatgcgcccagaagttcaacggtctcaccgtgctgccaccattgttgactgacgaaatgatcgcacagtatacgtcagcgctgctggctggtaccattacttctggctggacattcggagccggtgcagcccttcagattccatttgcaatgcagatggcctatagatttaatggaataggagtgacgcagaacgtattgtacgagaatcaaaagttgatcgcaaaccagttcaattctgccattggaaagatacaagattccctttcttctaccgcctcagccctgggtaagttgcaagatgtcgtcaaccaaaatgcacaggctttgaataccttggtaaaacaattgtcatccaatttcggcgccataagctcagtacttaacgatatcttgtcacgattggatccccccgaagccgaggtccaaatcgataggctcatcacgggacggctccagagccttcaaacctatgtgacgcaacaactgatacgggccgcagaaatccgagcgtccgccaacttggcagctaccaagatgtccgaatgtgtactgggtcaatcaaagagagttgatttctgtggaaaaggataccatctcatgtcattcccccaaagcgccccgcacggcgtcgtgttcctccatgtgacttacgttccagcacaagaaaaaaacttcacaactgcgcccgctatctgccatgacgggaaggcgcacttcccacgagagggtgtatttgtgtcaaatggaacgcactggttcgtaacgcaaaggaacttctatgaaccgcagataatcacgactgacaacacttttgtatctggcaattgtgatgtggtcatcgggatagttaacaacactgtctatgacccgctgcaacccgagcttgattcatttaaagaagaactcgataaatatttcaagaatcacaccagtcccgatgtggaccttggagacatttccgggataaatgcctctgtggtaaacatccaaaaggaaatcgatcggctgaatgaagtggccaaaaacttgaacgaaagtctgatagaccttcaggagctcgggaagtatgaacaatacataaagtggccatggtacatctggcttgggttcatcgctggcctcatagccatcgttatggttaccatcatgctctgctgtatgacttcctgttgttcctgtctcaaagggtgttgcagctgtggtagctgctgcaaatttgacgaggatgactcagaacccgtcttgaagggagtcaagttgcactacacttagtgataa

SEQ ID NO: 113 - DNA, 3837 bp, Artificial Sequence
  Description of Artificial Sequence: Synthetic polynucleotide
  pKL040
atgaacgaggggtccatcatgtggctcgcgtccttggccgttgtgattgcatgtgccggagctactacccgcacacagctcccgccggcgtacactaactccttcacccggggggtttactacccggacaaagtgttccgcagcagtgtcctgcattcaacacaagatttgttccttccattctttagcaatgtcacttggttccatgctatacacgtgagtggcactaacggcactaagcgcttcgataacccggttctgccgtttaatgatggcgtttacttcgcaagtactgagaaatcaaacattatacgggggtggatattcggtactacattggatagtaaaactcaaagccttttgattgtcaacaatgcaactaatgtagtcataaaagtttgtgaattccaattctgtaacgatccctttcttggtgtgtattaccacaagaataacaaatcatggatggagtctgaatttcgagtatacagtagcgccaataattgcacgtttgagtatgtaagccagccgtttctgatggacttggaaggaaagcaaggcaactttaagaacctcagggagttcgtattcaaaaatatagacggttacttcaagatttactcaaaacatacacctatcaacttggtccgagatctcccacaaggtttttcagcgctcgagccattggtggacctgcccatcggaatcaacattacccgattccagacactgcttgcactgcaccggagttatctcacacccggcgacagctcgtctggttggacggcgggagctgccgcttactatgtcggttacttgcaacctcggacatttcttctgaagtataacgaaaacggtacgatcaccgatgccgtagactgcgctctcgatcccctttcagagacgaagtgcacgctcaaatcatttactgtggaaaaaggaatttatcaaacgagcaatttcagggtgcaacccacggagtccatcgtacgattcccaaacataacaaatctttgcccgtttggcgaggtttttaatgctacgcgctttgcatcagtgtacgcttggaataggaaacgaatctcaaattgtgttgcggattattccgtgttgtataattccgcaagcttctccacctttaaatgttatggcgtgtcccccacaaaacttaacgatctttgctttacaaatgtctatgcggattcattcgttatccgaggggatgaagtgcgacaaatcgctcctgggcagacagggaagatagctgattacaattacaaacttccagacgattttacaggatgtgtaatcgcgtggaactcaaacaatttggacagtaaggttggtggcaactacaattatctgtatagacttttcagaaaaagtaacctcaaacctttcgaacgcgacattagcactgagatataccaggccggatcaactccttgtaacggtgttgaaggtttcaactgttactttccgctccaatcctacggctttcaaccaacgaacggtgtcgggtaccaaccatacagagttgtcgtcttgagttttgagcttttgcacgcacctgcaaccgtgtgtggtccgaagaaaagtactaatctggttaaaaataaatgcgtcaatttcaactttaatgggttgacgggcacaggcgtgctgacagagtccaataaaaagtttttgccctttcagcagtttgggagggacatcgccgatacgaccgatgccgtccgagatcctcaaacccttgaaatattggacattaccccctgtagttttggcggtgtaagtgtgattactcccggaacgaatacatctaaccaggtagcggtgctttatcaagatgtcaactgtacagaggtccccgtggcgattcacgccgatcagttgacacccacatggagggtttacagcacaggatccaacgtcttccagacgagagcaggatgcttgatcggtgccgagcatgtgaataacagctacgaatgtgacattccgattggtgctggaatctgcgcaagttaccaaactcaaacgaattcccctggctccgcctcctctgtggcatcccagtctataatcgcgtatacgatgtcactgggcgccgagaattctgtcgcatatagcaacaactccatcgcaatacccacaaattttacaatttctgtgaccacggaaattctgcccgtcagcatgacaaaaactagcgtggactgcacgatgtatatctgcggcgactccacagagtgttccaacctcctcttgcaatatggcagcttttgcacacaattgaaccgagcgctcaccgggatagcggtcgagcaagataagaatacccaagaggtgtttgcccaggtgaagcaaatctataagacccctccaataaaggattttggcggcttcaatttctcacaaattttgcccgatccatctaagccgtccaagcgatcatttattgaggatctgctgttcaacaaagtcactctcgccgacgcggggtttattaaacaatatggcgattgcctgggcgacatcgccgccagggaccttatatgcgcccagaagttcaacggtctcaccgtgctgccaccattgttgactgacgaaatgatcgcacagtatacgtcagcgctgctggctggtaccattacttctggctggacattcggagccggtgcagcccttcagattccatttgcaatgcagatggcctatagatttaatggaataggagtgacgcagaacgtattgtacgagaatcaaaagttgatcgcaaaccagttcaattctgccattggaaagatacaagattccctttcttctaccgcctcagccctgggtaagttgcaagatgtcgtcaaccaaaatgcacaggctttgaataccttggtaaaacaattgtcatccaatttcggcgccataagctcagtacttaacgatatcttgtcacgattggatccccccgaagccgaggtccaaatcgataggctcatcacgggacggctccagagccttcaaacctatgtgacgcaacaactgatacgggccgcagaaatccgagcgtccgccaacttggcagctaccaagatgtccgaatgtgtactgggtcaatcaaagagagttgatttctgtggaaaaggataccatctcatgtcattcccccaaagcgccccgcacggcgtcgtgttcctccatgtgacttacgttccagcacaagaaaaaaacttcacaactgcgcccgctatctgccatgacgggaaggcgcacttcccacgagagggtgtatttgtgtcaaatggaacgcactggttcgtaacgcaaaggaacttctatgaaccgcagataatcacgactgacaacacttttgtatctggcaattgtgatgtggtcatcgggatagttaacaacactgtctatgacccgctgcaacccgagcttgattcatttaaagaagaactcgataaatatttcaagaatcacaccagtcccgatgtggaccttggagacatttccgggataaatgcctctgtggtaaacatccaaaaggaaatcgatcggctgaatgaagtggccaaaaacttgaacgaaagtctgatagaccttcaggagctcgggaagtatgaacaatacataaagtggccatggtacatctggcttgggttcatcgctggcctcatagccatcgttatggttaccatcatgctctgctgtatgacttcctgttgttcctgtctcaaagggtgttgcagctgtggtagctgctgcaaatttgacgaggatgactcagaacccgtcttgaagggagtcaagttgcactacacttagtgataa

SEQ ID NO: 114 - DNA, 3870 bp, Artificial Sequence
  Description of Artificial Sequence: Synthetic polynucleotide
  pKL041
atgggcaggaaacaaaacaaaaggggaggtaatgagggttccatcatgtggttggcttccctcgccgtggttattgcgtgcgctggtgctaacttgactacccgcacacagctcccgccggcgtacactaactccttcacccggggggtttactacccggacaaagtgttccgcagcagtgtcctgcattcaacacaagatttgttccttccattctttagcaatgtcacttggttccatgctatacacgtgagtggcactaacggcactaagcgcttcgataacccggttctgccgtttaatgatggcgtttacttcgcaagtactgagaaatcaaacattatacgggggtggatattcggtactacattggatagtaaaactcaaagccttttgattgtcaacaatgcaactaatgtagtcataaaagtttgtgaattccaattctgtaacgatccctttcttggtgtgtattaccacaagaataacaaatcatggatggagtctgaatttcgagtatacagtagcgccaataattgcacgtttgagtatgtaagccagccgtttctgatggacttggaaggaaagcaaggcaactttaagaacctcagggagttcgtattcaaaaatatagacggttacttcaagatttactcaaaacatacacctatcaacttggtccgagatctcccacaaggtttttcagcgctcgagccattggtggacctgcccatcggaatcaacattacccgattccagacactgcttgcactgcaccggagttatctcacacccggcgacagctcgtctggttggacggcgggagctgccgcttactatgtcggttacttgcaacctcggacatttcttctgaagtataacgaaaacggtacgatcaccgatgccgtagactgcgctctcgatcccctttcagagacgaagtgcacgctcaaatcatttactgtggaaaaaggaatttatcaaacgagcaatttcagggtgcaacccacggagtccatcgtacgattcccaaacataacaaatctttgcccgtttggcgaggtttttaatgctacgcgctttgcatcagtgtacgcttggaataggaaacgaatctcaaattgtgttgcggattattccgtgttgtataattccgcaagcttctccacctttaaatgttatggcgtgtcccccacaaaacttaacgatctttgctttacaaatgtctatgcggattcattcgttatccgaggggatgaagtgcgacaaatcgctcctgggcagacagggaagatagctgattacaattacaaacttccagacgattttacaggatgtgtaatcgcgtggaactcaaacaatttggacagtaaggttggtggcaactacaattatctgtatagacttttcagaaaaagtaacctcaaacctttcgaacgcgacattagcactgagatataccaggccggatcaactccttgtaacggtgttgaaggtttcaactgttactttccgctccaatcctacggctttcaaccaacgaacggtgtcgggtaccaaccatacagagttgtcgtcttgagttttgagcttttgcacgcacctgcaaccgtgtgtggtccgaagaaaagtactaatctggttaaaaataaatgcgtcaatttcaactttaatgggttgacgggcacaggcgtgctgacagagtccaataaaaagtttttgccctttcagcagtttgggagggacatcgccgatacgaccgatgccgtccgagatcctcaaacccttgaaatattggacattaccccctgtagttttggcggtgtaagtgtgattactcccggaacgaatacatctaaccaggtagcggtgctttatcaagatgtcaactgtacagaggtccccgtggcgattcacgccgatcagttgacacccacatggagggtttacagcacaggatccaacgtcttccagacgagagcaggatgcttgatcggtgccgagcatgtgaataacagctacgaatgtgacattccgattggtgctggaatctgcgcaagttaccaaactcaaacgaattcccctggctccgcctcctctgtggcatcccagtctataatcgcgtatacgatgtcactgggcgccgagaattctgtcgcatatagcaacaactccatcgcaatacccacaaattttacaatttctgtgaccacggaaattctgcccgtcagcatgacaaaaactagcgtggactgcacgatgtatatctgcggcgactccacagagtgttccaacctcctcttgcaatatggcagcttttgcacacaattgaaccgagcgctcaccgggatagcggtcgagcaagataagaatacccaagaggtgtttgcccaggtgaagcaaatctataagacccctccaataaaggattttggcggcttcaatttctcacaaattttgcccgatccatctaagccgtccaagcgatcatttattgaggatctgctgttcaacaaagtcactctcgccgacgcggggtttattaaacaatatggcgattgcctgggcgacatcgccgccagggaccttatatgcgcccagaagttcaacggtctcaccgtgctgccaccattgttgactgacgaaatgatcgcacagtatacgtcagcgctgctggctggtaccattacttctggctggacattcggagccggtgcagcccttcagattccatttgcaatgcagatggcctatagatttaatggaataggagtgacgcagaacgtattgtacgagaatcaaaagttgatcgcaaaccagttcaattctgccattggaaagatacaagattccctttcttctaccgcctcagccctgggtaagttgcaagatgtcgtcaaccaaaatgcacaggctttgaataccttggtaaaacaattgtcatccaatttcggcgccataagctcagtacttaacgatatcttgtcacgattggatccccccgaagccgaggtccaaatcgataggctcatcacgggacggctccagagccttcaaacctatgtgacgcaacaactgatacgggccgcagaaatccgagcgtccgccaacttggcagctaccaagatgtccgaatgtgtactgggtcaatcaaagagagttgatttctgtggaaaaggataccatctcatgtcattcccccaaagcgccccgcacggcgtcgtgttcctccatgtgacttacgttccagcacaagaaaaaaacttcacaactgcgcccgctatctgccatgacgggaaggcgcacttcccacgagagggtgtatttgtgtcaaatggaacgcactggttcgtaacgcaaaggaacttctatgaaccgcagataatcacgactgacaacacttttgtatctggcaattgtgatgtggtcatcgggatagttaacaacactgtctatgacccgctgcaacccgagcttgattcatttaaagaagaactcgataaatatttcaagaatcacaccagtcccgatgtggaccttggagacatttccgggataaatgcctctgtggtaaacatccaaaaggaaatcgatcggctgaatgaagtggccaaaaacttgaacgaaagtctgatagaccttcaggagctcgggaagtatgaacaatacataaagtggccatggtacatctggcttgggttcatcgctggcctcatagccatcgttatggttaccatcatgctctgctgtatgacttcctgttgttcctgtctcaaagggtgttgcagctgtggtagctgctgcaaatttgacgaggatgactcagaacccgtcttgaagggagtcaagttgcactacacttagtgataa

SEQ ID NO: 115 - DNA, 3864 bp, Artificial Sequence
  Description of Artificial Sequence: Synthetic polynucleotide
  pKL042
atgggcaggaaacaaaacaaaaggggaggtaatgagggttccatcatgtggttggcttccctcgccgtggttattgcgtgcgctggtgctactacccgcacacagctcccgccggcgtacactaactccttcacccggggggtttactacccggacaaagtgttccgcagcagtgtcctgcattcaacacaagatttgttccttccattctttagcaatgtcacttggttccatgctatacacgtgagtggcactaacggcactaagcgcttcgataacccggttctgccgtttaatgatggcgtttacttcgcaagtactgagaaatcaaacattatacgggggtggatattcggtactacattggatagtaaaactcaaagccttttgattgtcaacaatgcaactaatgtagtcataaaagtttgtgaattccaattctgtaacgatccctttcttggtgtgtattaccacaagaataacaaatcatggatggagtctgaatttcgagtatacagtagcgccaataattgcacgtttgagtatgtaagccagccgtttctgatggacttggaaggaaagcaaggcaactttaagaacctcagggagttcgtattcaaaaatatagacggttacttcaagatttactcaaaacatacacctatcaacttggtccgagatctcccacaaggtttttcagcgctcgagccattggtggacctgcccatcggaatcaacattacccgattccagacactgcttgcactgcaccggagttatctcacacccggcgacagctcgtctggttggacggcgggagctgccgcttactatgtcggttacttgcaacctcggacatttcttctgaagtataacgaaaacggtacgatcaccgatgccgtagactgcgctctcgatcccctttcagagacgaagtgcacgctcaaatcatttactgtggaaaaaggaatttatcaaacgagcaatttcagggtgcaacccacggagtccatcgtacgattcccaaacataacaaatctttgcccgtttggcgaggtttttaatgctacgcgctttgcatcagtgtacgcttggaataggaaacgaatctcaaattgtgttgcggattattccgtgttgtataattccgcaagcttctccacctttaaatgttatggcgtgtcccccacaaaacttaacgatctttgctttacaaatgtctatgcggattcattcgttatccgaggggatgaagtgcgacaaatcgctcctgggcagacagggaagatagctgattacaattacaaacttccagacgattttacaggatgtgtaatcgcgtggaactcaaacaatttggacagtaaggttggtggcaactacaattatctgtatagacttttcagaaaaagtaacctcaaacctttcgaacgcgacattagcactgagatataccaggccggatcaactccttgtaacggtgttgaaggtttcaactgttactttccgctccaatcctacggctttcaaccaacgaacggtgtcgggtaccaaccatacagagttgtcgtcttgagttttgagcttttgcacgcacctgcaaccgtgtgtggtccgaagaaaagtactaatctggttaaaaataaatgcgtcaatttcaactttaatgggttgacgggcacaggcgtgctgacagagtccaataaaaagtttttgccctttcagcagtttgggagggacatcgccgatacgaccgatgccgtccgagatcctcaaacccttgaaatattggacattaccccctgtagttttggcggtgtaagtgtgattactcccggaacgaatacatctaaccaggtagcggtgctttatcaagatgtcaactgtacagaggtccccgtggcgattcacgccgatcagttgacacccacatggagggtttacagcacaggatccaacgtcttccagacgagagcaggatgcttgatcggtgccgagcatgtgaataacagctacgaatgtgacattccgattggtgctggaatctgcgcaagttaccaaactcaaacgaattcccctggctccgcctcctctgtggcatcccagtctataatcgcgtatacgatgtcactgggcgccgagaattctgtcgcatatagcaacaactccatcgcaatacccacaaattttacaatttctgtgaccacggaaattctgcccgtcagcatgacaaaaactagcgtggactgcacgatgtatatctgcggcgactccacagagtgttccaacctcctcttgcaatatggcagcttttgcacacaattgaaccgagcgctcaccgggatagcggtcgagcaagataagaatacccaagaggtgtttgcccaggtgaagcaaatctataagacccctccaataaaggattttggcggcttcaatttctcacaaattttgcccgatccatctaagccgtccaagcgatcatttattgaggatctgctgttcaacaaagtcactctcgccgacgcggggtttattaaacaatatggcgattgcctgggcgacatcgccgccagggaccttatatgcgcccagaagttcaacggtctcaccgtgctgccaccattgttgactgacgaaatgatcgcacagtatacgtcagcgctgctggctggtaccattacttctggctggacattcggagccggtgcagcccttcagattccatttgcaatgcagatggcctatagatttaatggaataggagtgacgcagaacgtattgtacgagaatcaaaagttgatcgcaaaccagttcaattctgccattggaaagatacaagattccctttcttctaccgcctcagccctgggtaagttgcaagatgtcgtcaaccaaaatgcacaggctttgaataccttggtaaaacaattgtcatccaatttcggcgccataagctcagtacttaacgatatcttgtcacgattggatccccccgaagccgaggtccaaatcgataggctcatcacgggacggctccagagccttcaaacctatgtgacgcaacaactgatacgggccgcagaaatccgagcgtccgccaacttggcagctaccaagatgtccgaatgtgtactgggtcaatcaaagagagttgatttctgtggaaaaggataccatctcatgtcattcccccaaagcgccccgcacggcgtcgtgttcctccatgtgacttacgttccagcacaagaaaaaaacttcacaactgcgcccgctatctgccatgacgggaaggcgcacttcccacgagagggtgtatttgtgtcaaatggaacgcactggttcgtaacgcaaaggaacttctatgaaccgcagataatcacgactgacaacacttttgtatctggcaattgtgatgtggtcatcgggatagttaacaacactgtctatgacccgctgcaacccgagcttgattcatttaaagaagaactcgataaatatttcaagaatcacaccagtcccgatgtggaccttggagacatttccgggataaatgcctctgtggtaaacatccaaaaggaaatcgatcggctgaatgaagtggccaaaaacttgaacgaaagtctgatagaccttcaggagctcgggaagtatgaacaatacataaagtggccatggtacatctggcttgggttcatcgctggcctcatagccatcgttatggttaccatcatgctctgctgtatgacttcctgttgttcctgtctcaaagggtgttgcagctgtggtagctgctgcaaatttgacgaggatgactcagaacccgtcttgaagggagtcaagttgcactacacttagtgataa

SEQ ID NO: 116 - DNA, 3843 bp, Artificial Sequence
  Description of Artificial Sequence: Synthetic polynucleotide
  pKL043
atggaaactgatacactgttgctttgggtactcctcctctgggtccccggaagtacaggcgataacttgactacccgcacacagctcccgccggcgtacactaactccttcacccggggggtttactacccggacaaagtgttccgcagcagtgtcctgcattcaacacaagatttgttccttccattctttagcaatgtcacttggttccatgctatacacgtgagtggcactaacggcactaagcgcttcgataacccggttctgccgtttaatgatggcgtttacttcgcaagtactgagaaatcaaacattatacgggggtggatattcggtactacattggatagtaaaactcaaagccttttgattgtcaacaatgcaactaatgtagtcataaaagtttgtgaattccaattctgtaacgatccctttcttggtgtgtattaccacaagaataacaaatcatggatggagtctgaatttcgagtatacagtagcgccaataattgcacgtttgagtatgtaagccagccgtttctgatggacttggaaggaaagcaaggcaactttaagaacctcagggagttcgtattcaaaaatatagacggttacttcaagatttactcaaaacatacacctatcaacttggtccgagatctcccacaaggtttttcagcgctcgagccattggtggacctgcccatcggaatcaacattacccgattccagacactgcttgcactgcaccggagttatctcacacccggcgacagctcgtctggttggacggcgggagctgccgcttactatgtcggttacttgcaacctcggacatttcttctgaagtataacgaaaacggtacgatcaccgatgccgtagactgcgctctcgatcccctttcagagacgaagtgcacgctcaaatcatttactgtggaaaaaggaatttatcaaacgagcaatttcagggtgcaacccacggagtccatcgtacgattcccaaacataacaaatctttgcccgtttggcgaggtttttaatgctacgcgctttgcatcagtgtacgcttggaataggaaacgaatctcaaattgtgttgcggattattccgtgttgtataattccgcaagcttctccacctttaaatgttatggcgtgtcccccacaaaacttaacgatctttgctttacaaatgtctatgcggattcattcgttatccgaggggatgaagtgcgacaaatcgctcctgggcagacagggaagatagctgattacaattacaaacttccagacgattttacaggatgtgtaatcgcgtggaactcaaacaatttggacagtaaggttggtggcaactacaattatctgtatagacttttcagaaaaagtaacctcaaacctttcgaacgcgacattagcactgagatataccaggccggatcaactccttgtaacggtgttgaaggtttcaactgttactttccgctccaatcctacggctttcaaccaacgaacggtgtcgggtaccaaccatacagagttgtcgtcttgagttttgagcttttgcacgcacctgcaaccgtgtgtggtccgaagaaaagtactaatctggttaaaaataaatgcgtcaatttcaactttaatgggttgacgggcacaggcgtgctgacagagtccaataaaaagtttttgccctttcagcagtttgggagggacatcgccgatacgaccgatgccgtccgagatcctcaaacccttgaaatattggacattaccccctgtagttttggcggtgtaagtgtgattactcccggaacgaatacatctaaccaggtagcggtgctttatcaagatgtcaactgtacagaggtccccgtggcgattcacgccgatcagttgacacccacatggagggtttacagcacaggatccaacgtcttccagacgagagcaggatgcttgatcggtgccgagcatgtgaataacagctacgaatgtgacattccgattggtgctggaatctgcgcaagttaccaaactcaaacgaattcccctggctccgcctcctctgtggcatcccagtctataatcgcgtatacgatgtcactgggcgccgagaattctgtcgcatatagcaacaactccatcgcaatacccacaaattttacaatttctgtgaccacggaaattctgcccgtcagcatgacaaaaactagcgtggactgcacgatgtatatctgcggcgactccacagagtgttccaacctcctcttgcaatatggcagcttttgcacacaattgaaccgagcgctcaccgggatagcggtcgagcaagataagaatacccaagaggtgtttgcccaggtgaagcaaatctataagacccctccaataaaggattttggcggcttcaatttctcacaaattttgcccgatccatctaagccgtccaagcgatcatttattgaggatctgctgttcaacaaagtcactctcgccgacgcggggtttattaaacaatatggcgattgcctgggcgacatcgccgccagggaccttatatgcgcccagaagttcaacggtctcaccgtgctgccaccattgttgactgacgaaatgatcgcacagtatacgtcagcgctgctggctggtaccattacttctggctggacattcggagccggtgcagcccttcagattccatttgcaatgcagatggcctatagatttaatggaataggagtgacgcagaacgtattgtacgagaatcaaaagttgatcgcaaaccagttcaattctgccattggaaagatacaagattccctttcttctaccgcctcagccctgggtaagttgcaagatgtcgtcaaccaaaatgcacaggctttgaataccttggtaaaacaattgtcatccaatttcggcgccataagctcagtacttaacgatatcttgtcacgattggatccccccgaagccgaggtccaaatcgataggctcatcacgggacggctccagagccttcaaacctatgtgacgcaacaactgatacgggccgcagaaatccgagcgtccgccaacttggcagctaccaagatgtccgaatgtgtactgggtcaatcaaagagagttgatttctgtggaaaaggataccatctcatgtcattcccccaaagcgccccgcacggcgtcgtgttcctccatgtgacttacgttccagcacaagaaaaaaacttcacaactgcgcccgctatctgccatgacgggaaggcgcacttcccacgagagggtgtatttgtgtcaaatggaacgcactggttcgtaacgcaaaggaacttctatgaaccgcagataatcacgactgacaacacttttgtatctggcaattgtgatgtggtcatcgggatagttaacaacactgtctatgacccgctgcaacccgagcttgattcatttaaagaagaactcgataaatatttcaagaatcacaccagtcccgatgtggaccttggagacatttccgggataaatgcctctgtggtaaacatccaaaaggaaatcgatcggctgaatgaagtggccaaaaacttgaacgaaagtctgatagaccttcaggagctcgggaagtatgaacaatacataaagtggccatggtacatctggcttgggttcatcgctggcctcatagccatcgttatggttaccatcatgctctgctgtatgacttcctgttgttcctgtctcaaagggtgttgcagctgtggtagctgctgcaaatttgacgaggatgactcagaacccgtcttgaagggagtcaagttgcactacacttagtgataa

SEQ ID NO: 117 - DNA, 3837 bp, Artificial Sequence
  Description of Artificial Sequence: Synthetic polynucleotide
  pKL044
atggaaactgatacactgttgctttgggtactcctcctctgggtccccggaagtacaggcgatactacccgcacacagctcccgccggcgtacactaactccttcacccggggggtttactacccggacaaagtgttccgcagcagtgtcctgcattcaacacaagatttgttccttccattctttagcaatgtcacttggttccatgctatacacgtgagtggcactaacggcactaagcgcttcgataacccggttctgccgtttaatgatggcgtttacttcgcaagtactgagaaatcaaacattatacgggggtggatattcggtactacattggatagtaaaactcaaagccttttgattgtcaacaatgcaactaatgtagtcataaaagtttgtgaattccaattctgtaacgatccctttcttggtgtgtattaccacaagaataacaaatcatggatggagtctgaatttcgagtatacagtagcgccaataattgcacgtttgagtatgtaagccagccgtttctgatggacttggaaggaaagcaaggcaactttaagaacctcagggagttcgtattcaaaaatatagacggttacttcaagatttactcaaaacatacacctatcaacttggtccgagatctcccacaaggtttttcagcgctcgagccattggtggacctgcccatcggaatcaacattacccgattccagacactgcttgcactgcaccggagttatctcacacccggcgacagctcgtctggttggacggcgggagctgccgcttactatgtcggttacttgcaacctcggacatttcttctgaagtataacgaaaacggtacgatcaccgatgccgtagactgcgctctcgatcccctttcagagacgaagtgcacgctcaaatcatttactgtggaaaaaggaatttatcaaacgagcaatttcagggtgcaacccacggagtccatcgtacgattcccaaacataacaaatctttgcccgtttggcgaggtttttaatgctacgcgctttgcatcagtgtacgcttggaataggaaacgaatctcaaattgtgttgcggattattccgtgttgtataattccgcaagcttctccacctttaaatgttatggcgtgtcccccacaaaacttaacgatctttgctttacaaatgtctatgcggattcattcgttatccgaggggatgaagtgcgacaaatcgctcctgggcagacagggaagatagctgattacaattacaaacttccagacgattttacaggatgtgtaatcgcgtggaactcaaacaatttggacagtaaggttggtggcaactacaattatctgtatagacttttcagaaaaagtaacctcaaacctttcgaacgcgacattagcactgagatataccaggccggatcaactccttgtaacggtgttgaaggtttcaactgttactttccgctccaatcctacggctttcaaccaacgaacggtgtcgggtaccaaccatacagagttgtcgtcttgagttttgagcttttgcacgcacctgcaaccgtgtgtggtccgaagaaaagtactaatctggttaaaaataaatgcgtcaatttcaactttaatgggttgacgggcacaggcgtgctgacagagtccaataaaaagtttttgccctttcagcagtttgggagggacatcgccgatacgaccgatgccgtccgagatcctcaaacccttgaaatattggacattaccccctgtagttttggcggtgtaagtgtgattactcccggaacgaatacatctaaccaggtagcggtgctttatcaagatgtcaactgtacagaggtccccgtggcgattcacgccgatcagttgacacccacatggagggtttacagcacaggatccaacgtcttccagacgagagcaggatgcttgatcggtgccgagcatgtgaataacagctacgaatgtgacattccgattggtgctggaatctgcgcaagttaccaaactcaaacgaattcccctggctccgcctcctctgtggcatcccagtctataatcgcgtatacgatgtcactgggcgccgagaattctgtcgcatatagcaacaactccatcgcaatacccacaaattttacaatttctgtgaccacggaaattctgcccgtcagcatgacaaaaactagcgtggactgcacgatgtatatctgcggcgactccacagagtgttccaacctcctcttgcaatatggcagcttttgcacacaattgaaccgagcgctcaccgggatagcggtcgagcaagataagaatacccaagaggtgtttgcccaggtgaagcaaatctataagacccctccaataaaggattttggcggcttcaatttctcacaaattttgcccgatccatctaagccgtccaagcgatcatttattgaggatctgctgttcaacaaagtcactctcgccgacgcggggtttattaaacaatatggcgattgcctgggcgacatcgccgccagggaccttatatgcgcccagaagttcaacggtctcaccgtgctgccaccattgttgactgacgaaatgatcgcacagtatacgtcagcgctgctggctggtaccattacttctggctggacattcggagccggtgcagcccttcagattccatttgcaatgcagatggcctatagatttaatggaataggagtgacgcagaacgtattgtacgagaatcaaaagttgatcgcaaaccagttcaattctgccattggaaagatacaagattccctttcttctaccgcctcagccctgggtaagttgcaagatgtcgtcaaccaaaatgcacaggctttgaataccttggtaaaacaattgtcatccaatttcggcgccataagctcagtacttaacgatatcttgtcacgattggatccccccgaagccgaggtccaaatcgataggctcatcacgggacggctccagagccttcaaacctatgtgacgcaacaactgatacgggccgcagaaatccgagcgtccgccaacttggcagctaccaagatgtccgaatgtgtactgggtcaatcaaagagagttgatttctgtggaaaaggataccatctcatgtcattcccccaaagcgccccgcacggcgtcgtgttcctccatgtgacttacgttccagcacaagaaaaaaacttcacaactgcgcccgctatctgccatgacgggaaggcgcacttcccacgagagggtgtatttgtgtcaaatggaacgcactggttcgtaacgcaaaggaacttctatgaaccgcagataatcacgactgacaacacttttgtatctggcaattgtgatgtggtcatcgggatagttaacaacactgtctatgacccgctgcaacccgagcttgattcatttaaagaagaactcgataaatatttcaagaatcacaccagtcccgatgtggaccttggagacatttccgggataaatgcctctgtggtaaacatccaaaaggaaatcgatcggctgaatgaagtggccaaaaacttgaacgaaagtctgatagaccttcaggagctcgggaagtatgaacaatacataaagtggccatggtacatctggcttgggttcatcgctggcctcatagccatcgttatggttaccatcatgctctgctgtatgacttcctgttgttcctgtctcaaagggtgttgcagctgtggtagctgctgcaaatttgacgaggatgactcagaacccgtcttgaagggagtcaagttgcactacacttagtgataa

SEQ ID NO: 118 - DNA, 3843 bp, Artificial Sequence
  Description of Artificial Sequence: Synthetic polynucleotide
  pKL045
atgaggccgactctgctttggagtctgttgttgcttttgggtgtatttgctgcggcagcagccaacttgactacccgcacacagctcccgccggcgtacactaactccttcacccggggggtttactacccggacaaagtgttccgcagcagtgtcctgcattcaacacaagatttgttccttccattctttagcaatgtcacttggttccatgctatacacgtgagtggcactaacggcactaagcgcttcgataacccggttctgccgtttaatgatggcgtttacttcgcaagtactgagaaatcaaacattatacgggggtggatattcggtactacattggatagtaaaactcaaagccttttgattgtcaacaatgcaactaatgtagtcataaaagtttgtgaattccaattctgtaacgatccctttcttggtgtgtattaccacaagaataacaaatcatggatggagtctgaatttcgagtatacagtagcgccaataattgcacgtttgagtatgtaagccagccgtttctgatggacttggaaggaaagcaaggcaactttaagaacctcagggagttcgtattcaaaaatatagacggttacttcaagatttactcaaaacatacacctatcaacttggtccgagatctcccacaaggtttttcagcgctcgagccattggtggacctgcccatcggaatcaacattacccgattccagacactgcttgcactgcaccggagttatctcacacccggcgacagctcgtctggttggacggcgggagctgccgcttactatgtcggttacttgcaacctcggacatttcttctgaagtataacgaaaacggtacgatcaccgatgccgtagactgcgctctcgatcccctttcagagacgaagtgcacgctcaaatcatttactgtggaaaaaggaatttatcaaacgagcaatttcagggtgcaacccacggagtccatcgtacgattcccaaacataacaaatctttgcccgtttggcgaggtttttaatgctacgcgctttgcatcagtgtacgcttggaataggaaacgaatctcaaattgtgttgcggattattccgtgttgtataattccgcaagcttctccacctttaaatgttatggcgtgtcccccacaaaacttaacgatctttgctttacaaatgtctatgcggattcattcgttatccgaggggatgaagtgcgacaaatcgctcctgggcagacagggaagatagctgattacaattacaaacttccagacgattttacaggatgtgtaatcgcgtggaactcaaacaatttggacagtaaggttggtggcaactacaattatctgtatagacttttcagaaaaagtaacctcaaacctttcgaacgcgacattagcactgagatataccaggccggatcaactccttgtaacggtgttgaaggtttcaactgttactttccgctccaatcctacggctttcaaccaacgaacggtgtcgggtaccaaccatacagagttgtcgtcttgagttttgagcttttgcacgcacctgcaaccgtgtgtggtccgaagaaaagtactaatctggttaaaaataaatgcgtcaatttcaactttaatgggttgacgggcacaggcgtgctgacagagtccaataaaaagtttttgccctttcagcagtttgggagggacatcgccgatacgaccgatgccgtccgagatcctcaaacccttgaaatattggacattaccccctgtagttttggcggtgtaagtgtgattactcccggaacgaatacatctaaccaggtagcggtgctttatcaagatgtcaactgtacagaggtccccgtggcgattcacgccgatcagttgacacccacatggagggtttacagcacaggatccaacgtcttccagacgagagcaggatgcttgatcggtgccgagcatgtgaataacagctacgaatgtgacattccgattggtgctggaatctgcgcaagttaccaaactcaaacgaattcccctggctccgcctcctctgtggcatcccagtctataatcgcgtatacgatgtcactgggcgccgagaattctgtcgcatatagcaacaactccatcgcaatacccacaaattttacaatttctgtgaccacggaaattctgcccgtcagcatgacaaaaactagcgtggactgcacgatgtatatctgcggcgactccacagagtgttccaacctcctcttgcaatatggcagcttttgcacacaattgaaccgagcgctcaccgggatagcggtcgagcaagataagaatacccaagaggtgtttgcccaggtgaagcaaatctataagacccctccaataaaggattttggcggcttcaatttctcacaaattttgcccgatccatctaagccgtccaagcgatcatttattgaggatctgctgttcaacaaagtcactctcgccgacgcggggtttattaaacaatatggcgattgcctgggcgacatcgccgccagggaccttatatgcgcccagaagttcaacggtctcaccgtgctgccaccattgttgactgacgaaatgatcgcacagtatacgtcagcgctgctggctggtaccattacttctggctggacattcggagccggtgcagcccttcagattccatttgcaatgcagatggcctatagatttaatggaataggagtgacgcagaacgtattgtacgagaatcaaaagttgatcgcaaaccagttcaattctgccattggaaagatacaagattccctttcttctaccgcctcagccctgggtaagttgcaagatgtcgtcaaccaaaatgcacaggctttgaataccttggtaaaacaattgtcatccaatttcggcgccataagctcagtacttaacgatatcttgtcacgattggatccccccgaagccgaggtccaaatcgataggctcatcacgggacggctccagagccttcaaacctatgtgacgcaacaactgatacgggccgcagaaatccgagcgtccgccaacttggcagctaccaagatgtccgaatgtgtactgggtcaatcaaagagagttgatttctgtggaaaaggataccatctcatgtcattcccccaaagcgccccgcacggcgtcgtgttcctccatgtgacttacgttccagcacaagaaaaaaacttcacaactgcgcccgctatctgccatgacgggaaggcgcacttcccacgagagggtgtatttgtgtcaaatggaacgcactggttcgtaacgcaaaggaacttctatgaaccgcagataatcacgactgacaacacttttgtatctggcaattgtgatgtggtcatcgggatagttaacaacactgtctatgacccgctgcaacccgagcttgattcatttaaagaagaactcgataaatatttcaagaatcacaccagtcccgatgtggaccttggagacatttccgggataaatgcctctgtggtaaacatccaaaaggaaatcgatcggctgaatgaagtggccaaaaacttgaacgaaagtctgatagaccttcaggagctcgggaagtatgaacaatacataaagtggccatggtacatctggcttgggttcatcgctggcctcatagccatcgttatggttaccatcatgctctgctgtatgacttcctgttgttcctgtctcaaagggtgttgcagctgtggtagctgctgcaaatttgacgaggatgactcagaacccgtcttgaagggagtcaagttgcactacacttagtgataa

SEQ ID NO: 119 - DNA, 3837 bp, Artificial Sequence
  Description of Artificial Sequence: Synthetic polynucleotide
  pKL046
atgaggccgactctgctttggagtctgttgttgcttttgggtgtatttgctgcggcagcagccactacccgcacacagctcccgccggcgtacactaactccttcacccggggggtttactacccggacaaagtgttccgcagcagtgtcctgcattcaacacaagatttgttccttccattctttagcaatgtcacttggttccatgctatacacgtgagtggcactaacggcactaagcgcttcgataacccggttctgccgtttaatgatggcgtttacttcgcaagtactgagaaatcaaacattatacgggggtggatattcggtactacattggatagtaaaactcaaagccttttgattgtcaacaatgcaactaatgtagtcataaaagtttgtgaattccaattctgtaacgatccctttcttggtgtgtattaccacaagaataacaaatcatggatggagtctgaatttcgagtatacagtagcgccaataattgcacgtttgagtatgtaagccagccgtttctgatggacttggaaggaaagcaaggcaactttaagaacctcagggagttcgtattcaaaaatatagacggttacttcaagatttactcaaaacatacacctatcaacttggtccgagatctcccacaaggtttttcagcgctcgagccattggtggacctgcccatcggaatcaacattacccgattccagacactgcttgcactgcaccggagttatctcacacccggcgacagctcgtctggttggacggcgggagctgccgcttactatgtcggttacttgcaacctcggacatttcttctgaagtataacgaaaacggtacgatcaccgatgccgtagactgcgctctcgatcccctttcagagacgaagtgcacgctcaaatcatttactgtggaaaaaggaatttatcaaacgagcaatttcagggtgcaacccacggagtccatcgtacgattcccaaacataacaaatctttgcccgtttggcgaggtttttaatgctacgcgctttgcatcagtgtacgcttggaataggaaacgaatctcaaattgtgttgcggattattccgtgttgtataattccgcaagcttctccacctttaaatgttatggcgtgtcccccacaaaacttaacgatctttgctttacaaatgtctatgcggattcattcgttatccgaggggatgaagtgcgacaaatcgctcctgggcagacagggaagatagctgattacaattacaaacttccagacgattttacaggatgtgtaatcgcgtggaactcaaacaatttggacagtaaggttggtggcaactacaattatctgtatagacttttcagaaaaagtaacctcaaacctttcgaacgcgacattagcactgagatataccaggccggatcaactccttgtaacggtgttgaaggtttcaactgttactttccgctccaatcctacggctttcaaccaacgaacggtgtcgggtaccaaccatacagagttgtcgtcttgagttttgagcttttgcacgcacctgcaaccgtgtgtggtccgaagaaaagtactaatctggttaaaaataaatgcgtcaatttcaactttaatgggttgacgggcacaggcgtgctgacagagtccaataaaaagtttttgccctttcagcagtttgggagggacatcgccgatacgaccgatgccgtccgagatcctcaaacccttgaaatattggacattaccccctgtagttttggcggtgtaagtgtgattactcccggaacgaatacatctaaccaggtagcggtgctttatcaagatgtcaactgtacagaggtccccgtggcgattcacgccgatcagttgacacccacatggagggtttacagcacaggatccaacgtcttccagacgagagcaggatgcttgatcggtgccgagcatgtgaataacagctacgaatgtgacattccgattggtgctggaatctgcgcaagttaccaaactcaaacgaattcccctggctccgcctcctctgtggcatcccagtctataatcgcgtatacgatgtcactgggcgccgagaattctgtcgcatatagcaacaactccatcgcaatacccacaaattttacaatttctgtgaccacggaaattctgcccgtcagcatgacaaaaactagcgtggactgcacgatgtatatctgcggcgactccacagagtgttccaacctcctcttgcaatatggcagcttttgcacacaattgaaccgagcgctcaccgggatagcggtcgagcaagataagaatacccaagaggtgtttgcccaggtgaagcaaatctataagacccctccaataaaggattttggcggcttcaatttctcacaaattttgcccgatccatctaagccgtccaagcgatcatttattgaggatctgctgttcaacaaagtcactctcgccgacgcggggtttattaaacaatatggcgattgcctgggcgacatcgccgccagggaccttatatgcgcccagaagttcaacggtctcaccgtgctgccaccattgttgactgacgaaatgatcgcacagtatacgtcagcgctgctggctggtaccattacttctggctggacattcggagccggtgcagcccttcagattccatttgcaatgcagatggcctatagatttaatggaataggagtgacgcagaacgtattgtacgagaatcaaaagttgatcgcaaaccagttcaattctgccattggaaagatacaagattccctttcttctaccgcctcagccctgggtaagttgcaagatgtcgtcaaccaaaatgcacaggctttgaataccttggtaaaacaattgtcatccaatttcggcgccataagctcagtacttaacgatatcttgtcacgattggatccccccgaagccgaggtccaaatcgataggctcatcacgggacggctccagagccttcaaacctatgtgacgcaacaactgatacgggccgcagaaatccgagcgtccgccaacttggcagctaccaagatgtccgaatgtgtactgggtcaatcaaagagagttgatttctgtggaaaaggataccatctcatgtcattcccccaaagcgccccgcacggcgtcgtgttcctccatgtgacttacgttccagcacaagaaaaaaacttcacaactgcgcccgctatctgccatgacgggaaggcgcacttcccacgagagggtgtatttgtgtcaaatggaacgcactggttcgtaacgcaaaggaacttctatgaaccgcagataatcacgactgacaacacttttgtatctggcaattgtgatgtggtcatcgggatagttaacaacactgtctatgacccgctgcaacccgagcttgattcatttaaagaagaactcgataaatatttcaagaatcacaccagtcccgatgtggaccttggagacatttccgggataaatgcctctgtggtaaacatccaaaaggaaatcgatcggctgaatgaagtggccaaaaacttgaacgaaagtctgatagaccttcaggagctcgggaagtatgaacaatacataaagtggccatggtacatctggcttgggttcatcgctggcctcatagccatcgttatggttaccatcatgctctgctgtatgacttcctgttgttcctgtctcaaagggtgttgcagctgtggtagctgctgcaaatttgacgaggatgactcagaacccgtcttgaagggagtcaagttgcactacacttagtgataa

SEQ ID NO: 120 - DNA, 3837 bp, Artificial Sequence
  Description of Artificial Sequence: Synthetic polynucleotide
  pKL047
atgggtgttaaagtgttgtttgctttgatttgcattgcagtcgctgaagcaaaaccgaacttgactacccgcacacagctcccgccggcgtacactaactccttcacccggggggtttactacccggacaaagtgttccgcagcagtgtcctgcattcaacacaagatttgttccttccattctttagcaatgtcacttggttccatgctatacacgtgagtggcactaacggcactaagcgcttcgataacccggttctgccgtttaatgatggcgtttacttcgcaagtactgagaaatcaaacattatacgggggtggatattcggtactacattggatagtaaaactcaaagccttttgattgtcaacaatgcaactaatgtagtcataaaagtttgtgaattccaattctgtaacgatccctttcttggtgtgtattaccacaagaataacaaatcatggatggagtctgaatttcgagtatacagtagcgccaataattgcacgtttgagtatgtaagccagccgtttctgatggacttggaaggaaagcaaggcaactttaagaacctcagggagttcgtattcaaaaatatagacggttacttcaagatttactcaaaacatacacctatcaacttggtccgagatctcccacaaggtttttcagcgctcgagccattggtggacctgcccatcggaatcaacattacccgattccagacactgcttgcactgcaccggagttatctcacacccggcgacagctcgtctggttggacggcgggagctgccgcttactatgtcggttacttgcaacctcggacatttcttctgaagtataacgaaaacggtacgatcaccgatgccgtagactgcgctctcgatcccctttcagagacgaagtgcacgctcaaatcatttactgtggaaaaaggaatttatcaaacgagcaatttcagggtgcaacccacggagtccatcgtacgattcccaaacataacaaatctttgcccgtttggcgaggtttttaatgctacgcgctttgcatcagtgtacgcttggaataggaaacgaatctcaaattgtgttgcggattattccgtgttgtataattccgcaagcttctccacctttaaatgttatggcgtgtcccccacaaaacttaacgatctttgctttacaaatgtctatgcggattcattcgttatccgaggggatgaagtgcgacaaatcgctcctgggcagacagggaagatagctgattacaattacaaacttccagacgattttacaggatgtgtaatcgcgtggaactcaaacaatttggacagtaaggttggtggcaactacaattatctgtatagacttttcagaaaaagtaacctcaaacctttcgaacgcgacattagcactgagatataccaggccggatcaactccttgtaacggtgttgaaggtttcaactgttactttccgctccaatcctacggctttcaaccaacgaacggtgtcgggtaccaaccatacagagttgtcgtcttgagttttgagcttttgcacgcacctgcaaccgtgtgtggtccgaagaaaagtactaatctggttaaaaataaatgcgtcaatttcaactttaatgggttgacgggcacaggcgtgctgacagagtccaataaaaagtttttgccctttcagcagtttgggagggacatcgccgatacgaccgatgccgtccgagatcctcaaacccttgaaatattggacattaccccctgtagttttggcggtgtaagtgtgattactcccggaacgaatacatctaaccaggtagcggtgctttatcaagatgtcaactgtacagaggtccccgtggcgattcacgccgatcagttgacacccacatggagggtttacagcacaggatccaacgtcttccagacgagagcaggatgcttgatcggtgccgagcatgtgaataacagctacgaatgtgacattccgattggtgctggaatctgcgcaagttaccaaactcaaacgaattcccctggctccgcctcctctgtggcatcccagtctataatcgcgtatacgatgtcactgggcgccgagaattctgtcgcatatagcaacaactccatcgcaatacccacaaattttacaatttctgtgaccacggaaattctgcccgtcagcatgacaaaaactagcgtggactgcacgatgtatatctgcggcgactccacagagtgttccaacctcctcttgcaatatggcagcttttgcacacaattgaaccgagcgctcaccgggatagcggtcgagcaagataagaatacccaagaggtgtttgcccaggtgaagcaaatctataagacccctccaataaaggattttggcggcttcaatttctcacaaattttgcccgatccatctaagccgtccaagcgatcatttattgaggatctgctgttcaacaaagtcactctcgccgacgcggggtttattaaacaatatggcgattgcctgggcgacatcgccgccagggaccttatatgcgcccagaagttcaacggtctcaccgtgctgccaccattgttgactgacgaaatgatcgcacagtatacgtcagcgctgctggctggtaccattacttctggctggacattcggagccggtgcagcccttcagattccatttgcaatgcagatggcctatagatttaatggaataggagtgacgcagaacgtattgtacgagaatcaaaagttgatcgcaaaccagttcaattctgccattggaaagatacaagattccctttcttctaccgcctcagccctgggtaagttgcaagatgtcgtcaaccaaaatgcacaggctttgaataccttggtaaaacaattgtcatccaatttcggcgccataagctcagtacttaacgatatcttgtcacgattggatccccccgaagccgaggtccaaatcgataggctcatcacgggacggctccagagccttcaaacctatgtgacgcaacaactgatacgggccgcagaaatccgagcgtccgccaacttggcagctaccaagatgtccgaatgtgtactgggtcaatcaaagagagttgatttctgtggaaaaggataccatctcatgtcattcccccaaagcgccccgcacggcgtcgtgttcctccatgtgacttacgttccagcacaagaaaaaaacttcacaactgcgcccgctatctgccatgacgggaaggcgcacttcccacgagagggtgtatttgtgtcaaatggaacgcactggttcgtaacgcaaaggaacttctatgaaccgcagataatcacgactgacaacacttttgtatctggcaattgtgatgtggtcatcgggatagttaacaacactgtctatgacccgctgcaacccgagcttgattcatttaaagaagaactcgataaatatttcaagaatcacaccagtcccgatgtggaccttggagacatttccgggataaatgcctctgtggtaaacatccaaaaggaaatcgatcggctgaatgaagtggccaaaaacttgaacgaaagtctgatagaccttcaggagctcgggaagtatgaacaatacataaagtggccatggtacatctggcttgggttcatcgctggcctcatagccatcgttatggttaccatcatgctctgctgtatgacttcctgttgttcctgtctcaaagggtgttgcagctgtggtagctgctgcaaatttgacgaggatgactcagaacccgtcttgaagggagtcaagttgcactacacttagtgataa

SEQ ID NO: 121 - DNA, 3831 bp, Artificial Sequence
  Description of Artificial Sequence: Synthetic polynucleotide
  pKL048
atgggtgttaaagtgttgtttgctttgatttgcattgcagtcgctgaagcaaaaccgactacccgcacacagctcccgccggcgtacactaactccttcacccggggggtttactacccggacaaagtgttccgcagcagtgtcctgcattcaacacaagatttgttccttccattctttagcaatgtcacttggttccatgctatacacgtgagtggcactaacggcactaagcgcttcgataacccggttctgccgtttaatgatggcgtttacttcgcaagtactgagaaatcaaacattatacgggggtggatattcggtactacattggatagtaaaactcaaagccttttgattgtcaacaatgcaactaatgtagtcataaaagtttgtgaattccaattctgtaacgatccctttcttggtgtgtattaccacaagaataacaaatcatggatggagtctgaatttcgagtatacagtagcgccaataattgcacgtttgagtatgtaagccagccgtttctgatggacttggaaggaaagcaaggcaactttaagaacctcagggagttcgtattcaaaaatatagacggttacttcaagatttactcaaaacatacacctatcaacttggtccgagatctcccacaaggtttttcagcgctcgagccattggtggacctgcccatcggaatcaacattacccgattccagacactgcttgcactgcaccggagttatctcacacccggcgacagctcgtctggttggacggcgggagctgccgcttactatgtcggttacttgcaacctcggacatttcttctgaagtataacgaaaacggtacgatcaccgatgccgtagactgcgctctcgatcccctttcagagacgaagtgcacgctcaaatcatttactgtggaaaaaggaatttatcaaacgagcaatttcagggtgcaacccacggagtccatcgtacgattcccaaacataacaaatctttgcccgtttggcgaggtttttaatgctacgcgctttgcatcagtgtacgcttggaataggaaacgaatctcaaattgtgttgcggattattccgtgttgtataattccgcaagcttctccacctttaaatgttatggcgtgtcccccacaaaacttaacgatctttgctttacaaatgtctatgcggattcattcgttatccgaggggatgaagtgcgacaaatcgctcctgggcagacagggaagatagctgattacaattacaaacttccagacgattttacaggatgtgtaatcgcgtggaactcaaacaatttggacagtaaggttggtggcaactacaattatctgtatagacttttcagaaaaagtaacctcaaacctttcgaacgcgacattagcactgagatataccaggccggatcaactccttgtaacggtgttgaaggtttcaactgttactttccgctccaatcctacggctttcaaccaacgaacggtgtcgggtaccaaccatacagagttgtcgtcttgagttttgagcttttgcacgcacctgcaaccgtgtgtggtccgaagaaaagtactaatctggttaaaaataaatgcgtcaatttcaactttaatgggttgacgggcacaggcgtgctgacagagtccaataaaaagtttttgccctttcagcagtttgggagggacatcgccgatacgaccgatgccgtccgagatcctcaaacccttgaaatattggacattaccccctgtagttttggcggtgtaagtgtgattactcccggaacgaatacatctaaccaggtagcggtgctttatcaagatgtcaactgtacagaggtccccgtggcgattcacgccgatcagttgacacccacatggagggtttacagcacaggatccaacgtcttccagacgagagcaggatgcttgatcggtgccgagcatgtgaataacagctacgaatgtgacattccgattggtgctggaatctgcgcaagttaccaaactcaaacgaattcccctggctccgcctcctctgtggcatcccagtctataatcgcgtatacgatgtcactgggcgccgagaattctgtcgcatatagcaacaactccatcgcaatacccacaaattttacaatttctgtgaccacggaaattctgcccgtcagcatgacaaaaactagcgtggactgcacgatgtatatctgcggcgactccacagagtgttccaacctcctcttgcaatatggcagcttttgcacacaattgaaccgagcgctcaccgggatagcggtcgagcaagataagaatacccaagaggtgtttgcccaggtgaagcaaatctataagacccctccaataaaggattttggcggcttcaatttctcacaaattttgcccgatccatctaagccgtccaagcgatcatttattgaggatctgctgttcaacaaagtcactctcgccgacgcggggtttattaaacaatatggcgattgcctgggcgacatcgccgccagggaccttatatgcgcccagaagttcaacggtctcaccgtgctgccaccattgttgactgacgaaatgatcgcacagtatacgtcagcgctgctggctggtaccattacttctggctggacattcggagccggtgcagcccttcagattccatttgcaatgcagatggcctatagatttaatggaataggagtgacgcagaacgtattgtacgagaatcaaaagttgatcgcaaaccagttcaattctgccattggaaagatacaagattccctttcttctaccgcctcagccctgggtaagttgcaagatgtcgtcaaccaaaatgcacaggctttgaataccttggtaaaacaattgtcatccaatttcggcgccataagctcagtacttaacgatatcttgtcacgattggatccccccgaagccgaggtccaaatcgataggctcatcacgggacggctccagagccttcaaacctatgtgacgcaacaactgatacgggccgcagaaatccgagcgtccgccaacttggcagctaccaagatgtccgaatgtgtactgggtcaatcaaagagagttgatttctgtggaaaaggataccatctcatgtcattcccccaaagcgccccgcacggcgtcgtgttcctccatgtgacttacgttccagcacaagaaaaaaacttcacaactgcgcccgctatctgccatgacgggaaggcgcacttcccacgagagggtgtatttgtgtcaaatggaacgcactggttcgtaacgcaaaggaacttctatgaaccgcagataatcacgactgacaacacttttgtatctggcaattgtgatgtggtcatcgggatagttaacaacactgtctatgacccgctgcaacccgagcttgattcatttaaagaagaactcgataaatatttcaagaatcacaccagtcccgatgtggaccttggagacatttccgggataaatgcctctgtggtaaacatccaaaaggaaatcgatcggctgaatgaagtggccaaaaacttgaacgaaagtctgatagaccttcaggagctcgggaagtatgaacaatacataaagtggccatggtacatctggcttgggttcatcgctggcctcatagccatcgttatggttaccatcatgctctgctgtatgacttcctgttgttcctgtctcaaagggtgttgcagctgtggtagctgctgcaaatttgacgaggatgactcagaacccgtcttgaagggagtcaagttgcactacacttagtgataa

SEQ ID NO: 122 - RNA, 3717 nt, Artificial Sequence
  Description of Artificial Sequence: Synthetic polynucleotide
  pJW18
auguuuguuuuucuuguucuucugccauuggugucuucccaaugugugaacuugacuacccgcacacagcucccgccggcguacacuaacuccuucacccgggggguuuacuacccggacaaaguguuccgcagcaguguccugcauucaacacaagauuuguuccuuccauucuuuagcaaugucacuugguuccaugcuauacacgugaguggcacuaacggcacuaagcgcuucgauaacccgguucugccguuuaaugauggcguuuacuucgcaaguacugagaaaucaaacauuauacggggguggauauucgguacuacauuggauaguaaaacucaaagccuuuugauugucaacaaugcaacuaauguagucauaaaaguuugugaauuccaauucuguaacgaucccuuucuugguguguauuaccacaagaauaacaaaucauggauggagucugaauuucgaguauacaguagcgccaauaauugcacguuugaguauguaagccagccguuucugauggacuuggaaggaaagcaaggcaacuuuaagaaccucagggaguucguauucaaaaauauagacgguuacuucaagauuuacucaaaacauacaccuaucaacuugguccgagaucucccacaagguuuuucagcgcucgagccauugguggaccugcccaucggaaucaacauuacccgauuccagacacugcuugcacugcaccggaguuaucucacacccggcgacagcucgucugguuggacggcgggagcugccgcuuacuaugucgguuacuugcaaccucggacauuucuucugaaguauaacgaaaacgguacgaucaccgaugccguagacugcgcucucgauccccuuucagagacgaagugcacgcucaaaucauuuacuguggaaaaaggaauuuaucaaacgagcaauuucagggugcaacccacggaguccaucguacgauucccaaacauaacaaaucuuugcccguuuggcgagguuuuuaaugcuacgcgcuuugcaucaguguacgcuuggaauaggaaacgaaucucaaauuguguugcggauuauuccguguuguauaauuccgcaagcuucuccaccuuuaaauguuauggcgugucccccacaaaacuuaacgaucuuugcuuuacaaaugucuaugcggauucauucguuauccgaggggaugaagugcgacaaaucgcuccugggcagacagggaagauagcugauuacaauuacaaacuuccagacgauuuuacaggauguguaaucgcguggaacucaaacaauuuggacaguaagguugguggcaacuacaauuaucuguauagacuuuucagaaaaaguaaccucaaaccuuucgaacgcgacauuagcacugagauauaccaggccggaucaacuccuuguaacgguguugaagguuucaacuguuacuuuccgcuccaauccuacggcuuucaaccaacgaacggugucggguaccaaccauacagaguugucgucuugaguuuugagcuuuugcacgcaccugcaaccgugugugguccgaagaaaaguacuaaucugguuaaaaauaaaugcgucaauuucaacuuuaauggguugacgggcacaggcgugcugacagaguccaauaaaaaguuuuugcccuuucagcaguuugggagggacaucgccgauacgaccgaugccguccgagauccucaaacccuugaaauauuggacauuacccccuguaguuuuggcgguguaagugugauuacucccggaacgaauacaucuaaccagguagcggugcuuuaucaagaugucaacuguacagagguccccguggcgauucacgccgaucaguugacacccacauggaggguuuacagcacaggauccaacgucuuccagacgagagcaggaugcuugaucggugccgagcaugugaauaacagcuacgaaugugacauuccgauuggugcuggaaucugcgcaaguuaccaaacucaaacgaauuccccuggcuccgccuccucuguggcaucccagucuauaaucgcguauacgaugucacugggcgccgagaauucugucgcauauagcaacaacuccaucgcaauacccacaaauuuuacaauuucugugaccacggaaauucugcccgucagcaugacaaaaacuagcguggacugcacgauguauaucugcggcgacuccacagaguguuccaaccuccucuugcaauauggcagcuuuugcacacaauugaaccgagcgcucaccgggauagcggucgagcaagauaagaauacccaagagguguuugcccaggugaagcaaaucuauaagaccccuccaauaaaggauuuuggcggcuucaauuucucacaaauuuugcccgauccaucuaagccguccaagcgaucauuuauugaggaucugcuguucaacaaagucacucucgccgacgcgggguuuauuaaacaauauggcgauugccugggcgacaucgccgccagggaccuuauaugcgcccagaaguucaacggucucaccgugcugccaccauuguugacugacgaaaugaucgcacaguauacgucagcgcugcuggcugguaccauuacuucuggcuggacauucggagccggugcagcccuucagauuccauuugcaaugcagauggccuauagauuuaauggaauaggagugacgcagaacguauuguacgagaaucaaaaguugaucgcaaaccaguucaauucugccauuggaaagauacaagauucccuuucuucuaccgccucagcccuggguaaguugcaagaugucgucaaccaaaaugcacaggcuuugaauaccuugguaaaacaauugucauccaauuucggcgccauaagcucaguacuuaacgauaucuugucacgauuggauccccccgaagccgagguccaaaucgauaggcucaucacgggacggcuccagagccuucaaaccuaugugacgcaacaacugauacgggccgcagaaauccgagcguccgccaacuuggcagcuaccaagauguccgaauguguacugggucaaucaaagagaguugauuucuguggaaaaggauaccaucucaugucauucccccaaagcgccccgcacggcgucguguuccuccaugugacuuacguuccagcacaagaaaaaaacuucacaacugcgcccgcuaucugccaugacgggaaggcgcacuucccacgagaggguguauuugugucaaauggaacgcacugguucguaacgcaaaggaacuucuaugaaccgcagauaaucacgacugacaacacuuuuguaucuggcaauugugauguggucaucgggauaguuaacaacacugucuaugacccgcugcaacccgagcuugauucauuuaaagaagaacucgauaaauauuucaagaaucacaccagucccgauguggaccuuggagacauuuccgggauaaaugccucugugguaaacauccaaaaggaaaucgaucggcugaaugaaguggccaaaaacuugaacgaaagucugauagaccuucaggagcucgggaaguaugaacaagggagcgguuauauuccugaagcuccaagagaugggcaagcuuacguucguaaagauggcgaauggguacuucuuucuaccuuuuuaugauga

SEQ ID NO: 123 - RNA, 3723 nt, Artificial Sequence
  Description of Artificial Sequence: Synthetic polynucleotide
  pKL049
auggguguuaaagugcuuuucgcucuuaucuguauagcugucgcugaggcaaagaacuugacuacccgcacacagcucccgccggcguacacuaacuccuucacccgggggguuuacuacccggacaaaguguuccgcagcaguguccugcauucaacacaagauuuguuccuuccauucuuuagcaaugucacuugguuccaugcuauacacgugaguggcacuaacggcacuaagcgcuucgauaacccgguucugccguuuaaugauggcguuuacuucgcaaguacugagaaaucaaacauuauacggggguggauauucgguacuacauuggauaguaaaacucaaagccuuuugauugucaacaaugcaacuaauguagucauaaaaguuugugaauuccaauucuguaacgaucccuuucuugguguguauuaccacaagaauaacaaaucauggauggagucugaauuucgaguauacaguagcgccaauaauugcacguuugaguauguaagccagccguuucugauggacuuggaaggaaagcaaggcaacuuuaagaaccucagggaguucguauucaaaaauauagacgguuacuucaagauuuacucaaaacauacaccuaucaacuugguccgagaucucccacaagguuuuucagcgcucgagccauugguggaccugcccaucggaaucaacauuacccgauuccagacacugcuugcacugcaccggaguuaucucacacccggcgacagcucgucugguuggacggcgggagcugccgcuuacuaugucgguuacuugcaaccucggacauuucuucugaaguauaacgaaaacgguacgaucaccgaugccguagacugcgcucucgauccccuuucagagacgaagugcacgcucaaaucauuuacuguggaaaaaggaauuuaucaaacgagcaauuucagggugcaacccacggaguccaucguacgauucccaaacauaacaaaucuuugcccguuuggcgagguuuuuaaugcuacgcgcuuugcaucaguguacgcuuggaauaggaaacgaaucucaaauuguguugcggauuauuccguguuguauaauuccgcaagcuucuccaccuuuaaauguuauggcgugucccccacaaaacuuaacgaucuuugcuuuacaaaugucuaugcggauucauucguuauccgaggggaugaagugcgacaaaucgcuccugggcagacagggaagauagcugauuacaauuacaaacuuccagacgauuuuacaggauguguaaucgcguggaacucaaacaauuuggacaguaagguugguggcaacuacaauuaucuguauagacuuuucagaaaaaguaaccucaaaccuuucgaacgcgacauuagcacugagauauaccaggccggaucaacuccuuguaacgguguugaagguuucaacuguuacuuuccgcuccaauccuacggcuuucaaccaacgaacggugucggguaccaaccauacagaguugucgucuugaguuuugagcuuuugcacgcaccugcaaccgugugugguccgaagaaaaguacuaaucugguuaaaaauaaaugcgucaauuucaacuuuaauggguugacgggcacaggcgugcugacagaguccaauaaaaaguuuuugcccuuucagcaguuugggagggacaucgccgauacgaccgaugccguccgagauccucaaacccuugaaauauuggacauuacccccuguaguuuuggcgguguaagugugauuacucccggaacgaauacaucuaaccagguagcggugcuuuaucaagaugucaacuguacagagguccccguggcgauucacgccgaucaguugacacccacauggaggguuuacagcacaggauccaacgucuuccagacgagagcaggaugcuugaucggugccgagcaugugaauaacagcuacgaaugugacauuccgauuggugcuggaaucugcgcaaguuaccaaacucaaacgaauuccccuggcuccgccuccucuguggcaucccagucuauaaucgcguauacgaugucacugggcgccgagaauucugucgcauauagcaacaacuccaucgcaauacccacaaauuuuacaauuucugugaccacggaaauucugcccgucagcaugacaaaaacuagcguggacugcacgauguauaucugcggcgacuccacagaguguuccaaccuccucuugcaauauggcagcuuuugcacacaauugaaccgagcgcucaccgggauagcggucgagcaagauaagaauacccaagagguguuugcccaggugaagcaaaucuauaagaccccuccaauaaaggauuuuggcggcuucaauuucucacaaauuuugcccgauccaucuaagccguccaagcgaucauuuauugaggaucugcuguucaacaaagucacucucgccgacgcgggguuuauuaaacaauauggcgauugccugggcgacaucgccgccagggaccuuauaugcgcccagaaguucaacggucucaccgugcugccaccauuguugacugacgaaaugaucgcacaguauacgucagcgcugcuggcugguaccauuacuucuggcuggacauucggagccggugcagcccuucagauuccauuugcaaugcagauggccuauagauuuaauggaauaggagugacgcagaacguauuguacgagaaucaaaaguugaucgcaaaccaguucaauucugccauuggaaagauacaagauucccuuucuucuaccgccucagcccuggguaaguugcaagaugucgucaaccaaaaugcacaggcuuugaauaccuugguaaaacaauugucauccaauuucggcgccauaagcucaguacuuaacgauaucuugucacgauuggauccccccgaagccgagguccaaaucgauaggcucaucacgggacggcuccagagccuucaaaccuaugugacgcaacaacugauacgggccgcagaaauccgagcguccgccaacuuggcagcuaccaagauguccgaauguguacugggucaaucaaagagaguugauuucuguggaaaaggauaccaucucaugucauucccccaaagcgccccgcacggcgucguguuccuccaugugacuuacguuccagcacaagaaaaaaacuucacaacugcgcccgcuaucugccaugacgggaaggcgcacuucccacgagaggguguauuugugucaaauggaacgcacugguucguaacgcaaaggaacuucuaugaaccgcagauaaucacgacugacaacacuuuuguaucuggcaauugugauguggucaucgggauaguuaacaacacugucuaugacccgcugcaacccgagcuugauucauuuaaagaagaacucgauaaauauuucaagaaucacaccagucccgauguggaccuuggagacauuuccgggauaaaugccucugugguaaacauccaaaaggaaaucgaucggcugaaugaaguggccaaaaacuugaacgaaagucugauagaccuucaggagcucgggaaguaugaacaagggagcgguuauauuccugaagcuccaagagaugggcaagcuuacguucguaaagauggcgaauggguacuucuuucuaccuuuuuaugauga

SEQ ID NO: 124 - RNA, 3717 nt, Artificial Sequence
  Description of Artificial Sequence: Synthetic polynucleotide
  pKL050
auggguguuaaagugcuuuucgcucuuaucuguauagcugucgcugaggcaaagacuacccgcacacagcucccgccggcguacacuaacuccuucacccgggggguuuacuacccggacaaaguguuccgcagcaguguccugcauucaacacaagauuuguuccuuccauucuuuagcaaugucacuugguuccaugcuauacacgugaguggcacuaacggcacuaagcgcuucgauaacccgguucugccguuuaaugauggcguuuacuucgcaaguacugagaaaucaaacauuauacggggguggauauucgguacuacauuggauaguaaaacucaaagccuuuugauugucaacaaugcaacuaauguagucauaaaaguuugugaauuccaauucuguaacgaucccuuucuugguguguauuaccacaagaauaacaaaucauggauggagucugaauuucgaguauacaguagcgccaauaauugcacguuugaguauguaagccagccguuucugauggacuuggaaggaaagcaaggcaacuuuaagaaccucagggaguucguauucaaaaauauagacgguuacuucaagauuuacucaaaacauacaccuaucaacuugguccgagaucucccacaagguuuuucagcgcucgagccauugguggaccugcccaucggaaucaacauuacccgauuccagacacugcuugcacugcaccggaguuaucucacacccggcgacagcucgucugguuggacggcgggagcugccgcuuacuaugucgguuacuugcaaccucggacauuucuucugaaguauaacgaaaacgguacgaucaccgaugccguagacugcgcucucgauccccuuucagagacgaagugcacgcucaaaucauuuacuguggaaaaaggaauuuaucaaacgagcaauuucagggugcaacccacggaguccaucguacgauucccaaacauaacaaaucuuugcccguuuggcgagguuuuuaaugcuacgcgcuuugcaucaguguacgcuuggaauaggaaacgaaucucaaauuguguugcggauuauuccguguuguauaauuccgcaagcuucuccaccuuuaaauguuauggcgugucccccacaaaacuuaacgaucuuugcuuuacaaaugucuaugcggauucauucguuauccgaggggaugaagugcgacaaaucgcuccugggcagacagggaagauagcugauuacaauuacaaacuuccagacgauuuuacaggauguguaaucgcguggaacucaaacaauuuggacaguaagguugguggcaacuacaauuaucuguauagacuuuucagaaaaaguaaccucaaaccuuucgaacgcgacauuagcacugagauauaccaggccggaucaacuccuuguaacgguguugaagguuucaacuguuacuuuccgcuccaauccuacggcuuucaaccaacgaacggugucggguaccaaccauacagaguugucgucuugaguuuugagcuuuugcacgcaccugcaaccgugugugguccgaagaaaaguacuaaucugguuaaaaauaaaugcgucaauuucaacuuuaauggguugacgggcacaggcgugcugacagaguccaauaaaaaguuuuugcccuuucagcaguuugggagggacaucgccgauacgaccgaugccguccgagauccucaaacccuugaaauauuggacauuacccccuguaguuuuggcgguguaagugugauuacucccggaacgaauacaucuaaccagguagcggugcuuuaucaagaugucaacuguacagagguccccguggcgauucacgccgaucaguugacacccacauggaggguuuacagcacaggauccaacgucuuccagacgagagcaggaugcuugaucggugccgagcaugugaauaacagcuacgaaugugacauuccgauuggugcuggaaucugcgcaaguuaccaaacucaaacgaauuccccuggcuccgccuccucuguggcaucccagucuauaaucgcguauacgaugucacugggcgccgagaauucugucgcauauagcaacaacuccaucgcaauacccacaaauuuuacaauuucugugaccacggaaauucugcccgucagcaugacaaaaacuagcguggacugcacgauguauaucugcggcgacuccacagaguguuccaaccuccucuugcaauauggcagcuuuugcacacaauugaaccgagcgcucaccgggauagcggucgagcaagauaagaauacccaagagguguuugcccaggugaagcaaaucuauaagaccccuccaauaaaggauuuuggcggcuucaauuucucacaaauuuugcccgauccaucuaagccguccaagcgaucauuuauugaggaucugcuguucaacaaagucacucucgccgacgcgggguuuauuaaacaauauggcgauugccugggcgacaucgccgccagggaccuuauaugcgcccagaaguucaacggucucaccgugcugccaccauuguugacugacgaaaugaucgcacaguauacgucagcgcugcuggcugguaccauuacuucuggcuggacauucggagccggugcagcccuucagauuccauuugcaaugcagauggccuauagauuuaauggaauaggagugacgcagaacguauuguacgagaaucaaaaguugaucgcaaaccaguucaauucugccauuggaaagauacaagauucccuuucuucuaccgccucagcccuggguaaguugcaagaugucgucaaccaaaaugcacaggcuuugaauaccuugguaaaacaauugucauccaauuucggcgccauaagcucaguacuuaacgauaucuugucacgauuggauccccccgaagccgagguccaaaucgauaggcucaucacgggacggcuccagagccuucaaaccuaugugacgcaacaacugauacgggccgcagaaauccgagcguccgccaacuuggcagcuaccaagauguccgaauguguacugggucaaucaaagagaguugauuucuguggaaaaggauaccaucucaugucauucccccaaagcgccccgcacggcgucguguuccuccaugugacuuacguuccagcacaagaaaaaaacuucacaacugcgcccgcuaucugccaugacgggaaggcgcacuucccacgagaggguguauuugugucaaauggaacgcacugguucguaacgcaaaggaacuucuaugaaccgcagauaaucacgacugacaacacuuuuguaucuggcaauugugauguggucaucgggauaguuaacaacacugucuaugacccgcugcaacccgagcuugauucauuuaaagaagaacucgauaaauauuucaagaaucacaccagucccgauguggaccuuggagacauuuccgggauaaaugccucugugguaaacauccaaaaggaaaucgaucggcugaaugaaguggccaaaaacuugaacgaaagucugauagaccuucaggagcucgggaaguaugaacaagggagcgguuauauuccugaagcuccaagagaugggcaagcuuacguucguaaagauggcgaauggguacuucuuucuaccuuuuuaugauga

SEQ ID NO: 125 - RNA, 3741 nt, Artificial Sequence
  Description of Artificial Sequence: Synthetic polynucleotide
  pKL051
augccuaugggcucucugcaaccccuugcaacccuuuauuuguuggggaugcuugucgcguccguccucgcgaacuugacuacccgcacacagcucccgccggcguacacuaacuccuucacccgggggguuuacuacccggacaaaguguuccgcagcaguguccugcauucaacacaagauuuguuccuuccauucuuuagcaaugucacuugguuccaugcuauacacgugaguggcacuaacggcacuaagcgcuucgauaacccgguucugccguuuaaugauggcguuuacuucgcaaguacugagaaaucaaacauuauacggggguggauauucgguacuacauuggauaguaaaacucaaagccuuuugauugucaacaaugcaacuaauguagucauaaaaguuugugaauuccaauucuguaacgaucccuuucuugguguguauuaccacaagaauaacaaaucauggauggagucugaauuucgaguauacaguagcgccaauaauugcacguuugaguauguaagccagccguuucugauggacuuggaaggaaagcaaggcaacuuuaagaaccucagggaguucguauucaaaaauauagacgguuacuucaagauuuacucaaaacauacaccuaucaacuugguccgagaucucccacaagguuuuucagcgcucgagccauugguggaccugcccaucggaaucaacauuacccgauuccagacacugcuugcacugcaccggaguuaucucacacccggcgacagcucgucugguuggacggcgggagcugccgcuuacuaugucgguuacuugcaaccucggacauuucuucugaaguauaacgaaaacgguacgaucaccgaugccguagacugcgcucucgauccccuuucagagacgaagugcacgcucaaaucauuuacuguggaaaaaggaauuuaucaaacgagcaauuucagggugcaacccacggaguccaucguacgauucccaaacauaacaaaucuuugcccguuuggcgagguuuuuaaugcuacgcgcuuugcaucaguguacgcuuggaauaggaaacgaaucucaaauuguguugcggauuauuccguguuguauaauuccgcaagcuucuccaccuuuaaauguuauggcgugucccccacaaaacuuaacgaucuuugcuuuacaaaugucuaugcggauucauucguuauccgaggggaugaagugcgacaaaucgcuccugggcagacagggaagauagcugauuacaauuacaaacuuccagacgauuuuacaggauguguaaucgcguggaacucaaacaauuuggacaguaagguugguggcaacuacaauuaucuguauagacuuuucagaaaaaguaaccucaaaccuuucgaacgcgacauuagcacugagauauaccaggccggaucaacuccuuguaacgguguugaagguuucaacuguuacuuuccgcuccaauccuacggcuuucaaccaacgaacggugucggguaccaaccauacagaguugucgucuugaguuuugagcuuuugcacgcaccugcaaccgugugugguccgaagaaaaguacuaaucugguuaaaaauaaaugcgucaauuucaacuuuaauggguugacgggcacaggcgugcugacagaguccaauaaaaaguuuuugcccuuucagcaguuugggagggacaucgccgauacgaccgaugccguccgagauccucaaacccuugaaauauuggacauuacccccuguaguuuuggcgguguaagugugauuacucccggaacgaauacaucuaaccagguagcggugcuuuaucaagaugucaacuguacagagguccccguggcgauucacgccgaucaguugacacccacauggaggguuuacagcacaggauccaacgucuuccagacgagagcaggaugcuugaucggugccgagcaugugaauaacagcuacgaaugugacauuccgauuggugcuggaaucugcgcaaguuaccaaacucaaacgaauuccccuggcuccgccuccucuguggcaucccagucuauaaucgcguauacgaugucacugggcgccgagaauucugucgcauauagcaacaacuccaucgcaauacccacaaauuuuacaauuucugugaccacggaaauucugcccgucagcaugacaaaaacuagcguggacugcacgauguauaucugcggcgacuccacagaguguuccaaccuccucuugcaauauggcagcuuuugcacacaauugaaccgagcgcucaccgggauagcggucgagcaagauaagaauacccaagagguguuugcccaggugaagcaaaucuauaagaccccuccaauaaaggauuuuggcggcuucaauuucucacaaauuuugcccgauccaucuaagccguccaagcgaucauuuauugaggaucugcuguucaacaaagucacucucgccgacgcgggguuuauuaaacaauauggcgauugccugggcgacaucgccgccagggaccuuauaugcgcccagaaguucaacggucucaccgugcugccaccauuguugacugacgaaaugaucgcacaguauacgucagcgcugcuggcugguaccauuacuucuggcuggacauucggagccggugcagcccuucagauuccauuugcaaugcagauggccuauagauuuaauggaauaggagugacgcagaacguauuguacgagaaucaaaaguugaucgcaaaccaguucaauucugccauuggaaagauacaagauucccuuucuucuaccgccucagcccuggguaaguugcaagaugucgucaaccaaaaugcacaggcuuugaauaccuugguaaaacaauugucauccaauuucggcgccauaagcucaguacuuaacgauaucuugucacgauuggauccccccgaagccgagguccaaaucgauaggcucaucacgggacggcuccagagccuucaaaccuaugugacgcaacaacugauacgggccgcagaaauccgagcguccgccaacuuggcagcuaccaagauguccgaauguguacugggucaaucaaagagaguugauuucuguggaaaaggauaccaucucaugucauucccccaaagcgccccgcacggcgucguguuccuccaugugacuuacguuccagcacaagaaaaaaacuucacaacugcgcccgcuaucugccaugacgggaaggcgcacuucccacgagaggguguauuugugucaaauggaacgcacugguucguaacgcaaaggaacuucuaugaaccgcagauaaucacgacugacaacacuuuuguaucuggcaauugugauguggucaucgggauaguuaacaacacugucuaugacccgcugcaacccgagcuugauucauuuaaagaagaacucgauaaauauuucaagaaucacaccagucccgauguggaccuuggagacauuuccgggauaaaugccucugugguaaacauccaaaaggaaaucgaucggcugaaugaaguggccaaaaacuugaacgaaagucugauagaccuucaggagcucgggaaguaugaacaagggagcgguuauauuccugaagcuccaagagaugggcaagcuuacguucguaaagauggcgaauggguacuucuuucuaccuuuuuaugauga

SEQ ID NO: 126 - RNA, 3735 nt, Artificial Sequence
  Description of Artificial Sequence: Synthetic polynucleotide
  pKL052
augccuaugggcucucugcaaccccuugcaacccuuuauuuguuggggaugcuugucgcguccguccucgcgacuacccgcacacagcucccgccggcguacacuaacuccuucacccgggggguuuacuacccggacaaaguguuccgcagcaguguccugcauucaacacaagauuuguuccuuccauucuuuagcaaugucacuugguuccaugcuauacacgugaguggcacuaacggcacuaagcgcuucgauaacccgguucugccguuuaaugauggcguuuacuucgcaaguacugagaaaucaaacauuauacggggguggauauucgguacuacauuggauaguaaaacucaaagccuuuugauugucaacaaugcaacuaauguagucauaaaaguuugugaauuccaauucuguaacgaucccuuucuugguguguauuaccacaagaauaacaaaucauggauggagucugaauuucgaguauacaguagcgccaauaauugcacguuugaguauguaagccagccguuucugauggacuuggaaggaaagcaaggcaacuuuaagaaccucagggaguucguauucaaaaauauagacgguuacuucaagauuuacucaaaacauacaccuaucaacuugguccgagaucucccacaagguuuuucagcgcucgagccauugguggaccugcccaucggaaucaacauuacccgauuccagacacugcuugcacugcaccggaguuaucucacacccggcgacagcucgucugguuggacggcgggagcugccgcuuacuaugucgguuacuugcaaccucggacauuucuucugaaguauaacgaaaacgguacgaucaccgaugccguagacugcgcucucgauccccuuucagagacgaagugcacgcucaaaucauuuacuguggaaaaaggaauuuaucaaacgagcaauuucagggugcaacccacggaguccaucguacgauucccaaacauaacaaaucuuugcccguuuggcgagguuuuuaaugcuacgcgcuuugcaucaguguacgcuuggaauaggaaacgaaucucaaauuguguugcggauuauuccguguuguauaauuccgcaagcuucuccaccuuuaaauguuauggcgugucccccacaaaacuuaacgaucuuugcuuuacaaaugucuaugcggauucauucguuauccgaggggaugaagugcgacaaaucgcuccugggcagacagggaagauagcugauuacaauuacaaacuuccagacgauuuuacaggauguguaaucgcguggaacucaaacaauuuggacaguaagguugguggcaacuacaauuaucuguauagacuuuucagaaaaaguaaccucaaaccuuucgaacgcgacauuagcacugagauauaccaggccggaucaacuccuuguaacgguguugaagguuucaacuguuacuuuccgcuccaauccuacggcuuucaaccaacgaacggugucggguaccaaccauacagaguugucgucuugaguuuugagcuuuugcacgcaccugcaaccgugugugguccgaagaaaaguacuaaucugguuaaaaauaaaugcgucaauuucaacuuuaauggguugacgggcacaggcgugcugacagaguccaauaaaaaguuuuugcccuuucagcaguuugggagggacaucgccgauacgaccgaugccguccgagauccucaaacccuugaaauauuggacauuacccccuguaguuuuggcgguguaagugugauuacucccggaacgaauacaucuaaccagguagcggugcuuuaucaagaugucaacuguacagagguccccguggcgauucacgccgaucaguugacacccacauggaggguuuacagcacaggauccaacgucuuccagacgagagcaggaugcuugaucggugccgagcaugugaauaacagcuacgaaugugacauuccgauuggugcuggaaucugcgcaaguuaccaaacucaaacgaauuccccuggcuccgccuccucuguggcaucccagucuauaaucgcguauacgaugucacugggcgccgagaauucugucgcauauagcaacaacuccaucgcaauacccacaaauuuuacaauuucugugaccacggaaauucugcccgucagcaugacaaaaacuagcguggacugcacgauguauaucugcggcgacuccacagaguguuccaaccuccucuugcaauauggcagcuuuugcacacaauugaaccgagcgcucaccgggauagcggucgagcaagauaagaauacccaagagguguuugcccaggugaagcaaaucuauaagaccccuccaauaaaggauuuuggcggcuucaauuucucacaaauuuugcccgauccaucuaagccguccaagcgaucauuuauugaggaucugcuguucaacaaagucacucucgccgacgcgggguuuauuaaacaauauggcgauugccugggcgacaucgccgccagggaccuuauaugcgcccagaaguucaacggucucaccgugcugccaccauuguugacugacgaaaugaucgcacaguauacgucagcgcugcuggcugguaccauuacuucuggcuggacauucggagccggugcagcccuucagauuccauuugcaaugcagauggccuauagauuuaauggaauaggagugacgcagaacguauuguacgagaaucaaaaguugaucgcaaaccaguucaauucugccauuggaaagauacaagauucccuuucuucuaccgccucagcccuggguaaguugcaagaugucgucaaccaaaaugcacaggcuuugaauaccuugguaaaacaauugucauccaauuucggcgccauaagcucaguacuuaacgauaucuugucacgauuggauccccccgaagccgagguccaaaucgauaggcucaucacgggacggcuccagagccuucaaaccuaugugacgcaacaacugauacgggccgcagaaauccgagcguccgccaacuuggcagcuaccaagauguccgaauguguacugggucaaucaaagagaguugauuucuguggaaaaggauaccaucucaugucauucccccaaagcgccccgcacggcgucguguuccuccaugugacuuacguuccagcacaagaaaaaaacuucacaacugcgcccgcuaucugccaugacgggaaggcgcacuucccacgagaggguguauuugugucaaauggaacgcacugguucguaacgcaaaggaacuucuaugaaccgcagauaaucacgacugacaacacuuuuguaucuggcaauugugauguggucaucgggauaguuaacaacacugucuaugacccgcugcaacccgagcuugauucauuuaaagaagaacucgauaaauauuucaagaaucacaccagucccgauguggaccuuggagacauuuccgggauaaaugccucugugguaaacauccaaaaggaaaucgaucggcugaaugaaguggccaaaaacuugaacgaaagucugauagaccuucaggagcucgggaaguaugaacaagggagcgguuauauuccugaagcuccaagagaugggcaagcuuacguucguaaagauggcgaauggguacuucuuucuaccuuuuuaugauga

SEQ ID NO: 127 - RNA, 3717 nt, Artificial Sequence
  Description of Artificial Sequence: Synthetic polynucleotide
  pKL053
augccccucuugcuucucuugccacugcugugggcuggggcggcagcuaacuugacuacccgcacacagcucccgccggcguacacuaacuccuucacccgggggguuuacuacccggacaaaguguuccgcagcaguguccugcauucaacacaagauuuguuccuuccauucuuuagcaaugucacuugguuccaugcuauacacgugaguggcacuaacggcacuaagcgcuucgauaacccgguucugccguuuaaugauggcguuuacuucgcaaguacugagaaaucaaacauuauacggggguggauauucgguacuacauuggauaguaaaacucaaagccuuuugauugucaacaaugcaacuaauguagucauaaaaguuugugaauuccaauucuguaacgaucccuuucuugguguguauuaccacaagaauaacaaaucauggauggagucugaauuucgaguauacaguagcgccaauaauugcacguuugaguauguaagccagccguuucugauggacuuggaaggaaagcaaggcaacuuuaagaaccucagggaguucguauucaaaaauauagacgguuacuucaagauuuacucaaaacauacaccuaucaacuugguccgagaucucccacaagguuuuucagcgcucgagccauugguggaccugcccaucggaaucaacauuacccgauuccagacacugcuugcacugcaccggaguuaucucacacccggcgacagcucgucugguuggacggcgggagcugccgcuuacuaugucgguuacuugcaaccucggacauuucuucugaaguauaacgaaaacgguacgaucaccgaugccguagacugcgcucucgauccccuuucagagacgaagugcacgcucaaaucauuuacuguggaaaaaggaauuuaucaaacgagcaauuucagggugcaacccacggaguccaucguacgauucccaaacauaacaaaucuuugcccguuuggcgagguuuuuaaugcuacgcgcuuugcaucaguguacgcuuggaauaggaaacgaaucucaaauuguguugcggauuauuccguguuguauaauuccgcaagcuucuccaccuuuaaauguuauggcgugucccccacaaaacuuaacgaucuuugcuuuacaaaugucuaugcggauucauucguuauccgaggggaugaagugcgacaaaucgcuccugggcagacagggaagauagcugauuacaauuacaaacuuccagacgauuuuacaggauguguaaucgcguggaacucaaacaauuuggacaguaagguugguggcaacuacaauuaucuguauagacuuuucagaaaaaguaaccucaaaccuuucgaacgcgacauuagcacugagauauaccaggccggaucaacuccuuguaacgguguugaagguuucaacuguuacuuuccgcuccaauccuacggcuuucaaccaacgaacggugucggguaccaaccauacagaguugucgucuugaguuuugagcuuuugcacgcaccugcaaccgugugugguccgaagaaaaguacuaaucugguuaaaaauaaaugcgucaauuucaacuuuaauggguugacgggcacaggcgugcugacagaguccaauaaaaaguuuuugcccuuucagcaguuugggagggacaucgccgauacgaccgaugccguccgagauccucaaacccuugaaauauuggacauuacccccuguaguuuuggcgguguaagugugauuacucccggaacgaauacaucuaaccagguagcggugcuuuaucaagaugucaacuguacagagguccccguggcgauucacgccgaucaguugacacccacauggaggguuuacagcacaggauccaacgucuuccagacgagagcaggaugcuugaucggugccgagcaugugaauaacagcuacgaaugugacauuccgauuggugcuggaaucugcgcaaguuaccaaacucaaacgaauuccccuggcuccgccuccucuguggcaucccagucuauaaucgcguauacgaugucacugggcgccgagaauucugucgcauauagcaacaacuccaucgcaauacccacaaauuuuacaauuucugugaccacggaaauucugcccgucagcaugacaaaaacuagcguggacugcacgauguauaucugcggcgacuccacagaguguuccaaccuccucuugcaauauggcagcuuuugcacacaauugaaccgagcgcucaccgggauagcggucgagcaagauaagaauacccaagagguguuugcccaggugaagcaaaucuauaagaccccuccaauaaaggauuuuggcggcuucaauuucucacaaauuuugcccgauccaucuaagccguccaagcgaucauuuauugaggaucugcuguucaacaaagucacucucgccgacgcgggguuuauuaaacaauauggcgauugccugggcgacaucgccgccagggaccuuauaugcgcccagaaguucaacggucucaccgugcugccaccauuguugacugacgaaaugaucgcacaguauacgucagcgcugcuggcugguaccauuacuucuggcuggacauucggagccggugcagcccuucagauuccauuugcaaugcagauggccuauagauuuaauggaauaggagugacgcagaacguauuguacgagaaucaaaaguugaucgcaaaccaguucaauucugccauuggaaagauacaagauucccuuucuucuaccgccucagcccuggguaaguugcaagaugucgucaaccaaaaugcacaggcuuugaauaccuugguaaaacaauugucauccaauuucggcgccauaagcucaguacuuaacgauaucuugucacgauuggauccccccgaagccgagguccaaaucgauaggcucaucacgggacggcuccagagccuucaaaccuaugugacgcaacaacugauacgggccgcagaaauccgagcguccgccaacuuggcagcuaccaagauguccgaauguguacugggucaaucaaagagaguugauuucuguggaaaaggauaccaucucaugucauucccccaaagcgccccgcacggcgucguguuccuccaugugacuuacguuccagcacaagaaaaaaacuucacaacugcgcccgcuaucugccaugacgggaaggcgcacuucccacgagaggguguauuugugucaaauggaacgcacugguucguaacgcaaaggaacuucuaugaaccgcagauaaucacgacugacaacacuuuuguaucuggcaauugugauguggucaucgggauaguuaacaacacugucuaugacccgcugcaacccgagcuugauucauuuaaagaagaacucgauaaauauuucaagaaucacaccagucccgauguggaccuuggagacauuuccgggauaaaugccucugugguaaacauccaaaaggaaaucgaucggcugaaugaaguggccaaaaacuugaacgaaagucugauagaccuucaggagcucgggaaguaugaacaagggagcgguuauauuccugaagcuccaagagaugggcaagcuuacguucguaaagauggcgaauggguacuucuuucuaccuuuuuaugauga

SEQ ID NO: 128 - RNA, 3711 nt, Artificial Sequence
  Description of Artificial Sequence: Synthetic polynucleotide
  pKL054
augccccucuugcuucucuugccacugcugugggcuggggcggcagcuacuacccgcacacagcucccgccggcguacacuaacuccuucacccgggggguuuacuacccggacaaaguguuccgcagcaguguccugcauucaacacaagauuuguuccuuccauucuuuagcaaugucacuugguuccaugcuauacacgugaguggcacuaacggcacuaagcgcuucgauaacccgguucugccguuuaaugauggcguuuacuucgcaaguacugagaaaucaaacauuauacggggguggauauucgguacuacauuggauaguaaaacucaaagccuuuugauugucaacaaugcaacuaauguagucauaaaaguuugugaauuccaauucuguaacgaucccuuucuugguguguauuaccacaagaauaacaaaucauggauggagucugaauuucgaguauacaguagcgccaauaauugcacguuugaguauguaagccagccguuucugauggacuuggaaggaaagcaaggcaacuuuaagaaccucagggaguucguauucaaaaauauagacgguuacuucaagauuuacucaaaacauacaccuaucaacuugguccgagaucucccacaagguuuuucagcgcucgagccauugguggaccugcccaucggaaucaacauuacccgauuccagacacugcuugcacugcaccggaguuaucucacacccggcgacagcucgucugguuggacggcgggagcugccgcuuacuaugucgguuacuugcaaccucggacauuucuucugaaguauaacgaaaacgguacgaucaccgaugccguagacugcgcucucgauccccuuucagagacgaagugcacgcucaaaucauuuacuguggaaaaaggaauuuaucaaacgagcaauuucagggugcaacccacggaguccaucguacgauucccaaacauaacaaaucuuugcccguuuggcgagguuuuuaaugcuacgcgcuuugcaucaguguacgcuuggaauaggaaacgaaucucaaauuguguugcggauuauuccguguuguauaauuccgcaagcuucuccaccuuuaaauguuauggcgugucccccacaaaacuuaacgaucuuugcuuuacaaaugucuaugcggauucauucguuauccgaggggaugaagugcgacaaaucgcuccugggcagacagggaagauagcugauuacaauuacaaacuuccagacgauuuuacaggauguguaaucgcguggaacucaaacaauuuggacaguaagguugguggcaacuacaauuaucuguauagacuuuucagaaaaaguaaccucaaaccuuucgaacgcgacauuagcacugagauauaccaggccggaucaacuccuuguaacgguguugaagguuucaacuguuacuuuccgcuccaauccuacggcuuucaaccaacgaacggugucggguaccaaccauacagaguugucgucuugaguuuugagcuuuugcacgcaccugcaaccgugugugguccgaagaaaaguacuaaucugguuaaaaauaaaugcgucaauuucaacuuuaauggguugacgggcacaggcgugcugacagaguccaauaaaaaguuuuugcccuuucagcaguuugggagggacaucgccgauacgaccgaugccguccgagauccucaaacccuugaaauauuggacauuacccccuguaguuuuggcgguguaagugugauuacucccggaacgaauacaucuaaccagguagcggugcuuuaucaagaugucaacuguacagagguccccguggcgauucacgccgaucaguugacacccacauggaggguuuacagcacaggauccaacgucuuccagacgagagcaggaugcuugaucggugccgagcaugugaauaacagcuacgaaugugacauuccgauuggugcuggaaucugcgcaaguuaccaaacucaaacgaauuccccuggcuccgccuccucuguggcaucccagucuauaaucgcguauacgaugucacugggcgccgagaauucugucgcauauagcaacaacuccaucgcaauacccacaaauuuuacaauuucugugaccacggaaauucugcccgucagcaugacaaaaacuagcguggacugcacgauguauaucugcggcgacuccacagaguguuccaaccuccucuugcaauauggcagcuuuugcacacaauugaaccgagcgcucaccgggauagcggucgagcaagauaagaauacccaagagguguuugcccaggugaagcaaaucuauaagaccccuccaauaaaggauuuuggcggcuucaauuucucacaaauuuugcccgauccaucuaagccguccaagcgaucauuuauugaggaucugcuguucaacaaagucacucucgccgacgcgggguuuauuaaacaauauggcgauugccugggcgacaucgccgccagggaccuuauaugcgcccagaaguucaacggucucaccgugcugccaccauuguugacugacgaaaugaucgcacaguauacgucagcgcugcuggcugguaccauuacuucuggcuggacauucggagccggugcagcccuucagauuccauuugcaaugcagauggccuauagauuuaauggaauaggagugacgcagaacguauuguacgagaaucaaaaguugaucgcaaaccaguucaauucugccauuggaaagauacaagauucccuuucuucuaccgccucagcccuggguaaguugcaagaugucgucaaccaaaaugcacaggcuuugaauaccuugguaaaacaauugucauccaauuucggcgccauaagcucaguacuuaacgauaucuugucacgauuggauccccccgaagccgagguccaaaucgauaggcucaucacgggacggcuccagagccuucaaaccuaugugacgcaacaacugauacgggccgcagaaauccgagcguccgccaacuuggcagcuaccaagauguccgaauguguacugggucaaucaaagagaguugauuucuguggaaaaggauaccaucucaugucauucccccaaagcgccccgcacggcgucguguuccuccaugugacuuacguuccagcacaagaaaaaaacuucacaacugcgcccgcuaucugccaugacgggaaggcgcacuucccacgagaggguguauuugugucaaauggaacgcacugguucguaacgcaaaggaacuucuaugaaccgcagauaaucacgacugacaacacuuuuguaucuggcaauugugauguggucaucgggauaguuaacaacacugucuaugacccgcugcaacccgagcuugauucauuuaaagaagaacucgauaaauauuucaagaaucacaccagucccgauguggaccuuggagacauuuccgggauaaaugccucugugguaaacauccaaaaggaaaucgaucggcugaaugaaguggccaaaaacuugaacgaaagucugauagaccuucaggagcucgggaaguaugaacaagggagcgguuauauuccugaagcuccaagagaugggcaagcuuacguucguaaagauggcgaauggguacuucuuucuaccuuuuuaugauga

SEQ ID NO: 129 - RNA, 3729 nt, Artificial Sequence
  Description of Artificial Sequence: Synthetic polynucleotide
  pKL055
auguaccgaaugcagcucuuguccugcauugcucucagccuugcacuugugaccaauuccaacuugacuacccgcacacagcucccgccggcguacacuaacuccuucacccgggggguuuacuacccggacaaaguguuccgcagcaguguccugcauucaacacaagauuuguuccuuccauucuuuagcaaugucacuugguuccaugcuauacacgugaguggcacuaacggcacuaagcgcuucgauaacccgguucugccguuuaaugauggcguuuacuucgcaaguacugagaaaucaaacauuauacggggguggauauucgguacuacauuggauaguaaaacucaaagccuuuugauugucaacaaugcaacuaauguagucauaaaaguuugugaauuccaauucuguaacgaucccuuucuugguguguauuaccacaagaauaacaaaucauggauggagucugaauuucgaguauacaguagcgccaauaauugcacguuugaguauguaagccagccguuucugauggacuuggaaggaaagcaaggcaacuuuaagaaccucagggaguucguauucaaaaauauagacgguuacuucaagauuuacucaaaacauacaccuaucaacuugguccgagaucucccacaagguuuuucagcgcucgagccauugguggaccugcccaucggaaucaacauuacccgauuccagacacugcuugcacugcaccggaguuaucucacacccggcgacagcucgucugguuggacggcgggagcugccgcuuacuaugucgguuacuugcaaccucggacauuucuucugaaguauaacgaaaacgguacgaucaccgaugccguagacugcgcucucgauccccuuucagagacgaagugcacgcucaaaucauuuacuguggaaaaaggaauuuaucaaacgagcaauuucagggugcaacccacggaguccaucguacgauucccaaacauaacaaaucuuugcccguuuggcgagguuuuuaaugcuacgcgcuuugcaucaguguacgcuuggaauaggaaacgaaucucaaauuguguugcggauuauuccguguuguauaauuccgcaagcuucuccaccuuuaaauguuauggcgugucccccacaaaacuuaacgaucuuugcuuuacaaaugucuaugcggauucauucguuauccgaggggaugaagugcgacaaaucgcuccugggcagacagggaagauagcugauuacaauuacaaacuuccagacgauuuuacaggauguguaaucgcguggaacucaaacaauuuggacaguaagguugguggcaacuacaauuaucuguauagacuuuucagaaaaaguaaccucaaaccuuucgaacgcgacauuagcacugagauauaccaggccggaucaacuccuuguaacgguguugaagguuucaacuguuacuuuccgcuccaauccuacggcuuucaaccaacgaacggugucggguaccaaccauacagaguugucgucuugaguuuugagcuuuugcacgcaccugcaaccgugugugguccgaagaaaaguacuaaucugguuaaaaauaaaugcgucaauuucaacuuuaauggguugacgggcacaggcgugcugacagaguccaauaaaaaguuuuugcccuuucagcaguuugggagggacaucgccgauacgaccgaugccguccgagauccucaaacccuugaaauauuggacauuacccccuguaguuuuggcgguguaagugugauuacucccggaacgaauacaucuaaccagguagcggugcuuuaucaagaugucaacuguacagagguccccguggcgauucacgccgaucaguugacacccacauggaggguuuacagcacaggauccaacgucuuccagacgagagcaggaugcuugaucggugccgagcaugugaauaacagcuacgaaugugacauuccgauuggugcuggaaucugcgcaaguuaccaaacucaaacgaauuccccuggcuccgccuccucuguggcaucccagucuauaaucgcguauacgaugucacugggcgccgagaauucugucgcauauagcaacaacuccaucgcaauacccacaaauuuuacaauuucugugaccacggaaauucugcccgucagcaugacaaaaacuagcguggacugcacgauguauaucugcggcgacuccacagaguguuccaaccuccucuugcaauauggcagcuuuugcacacaauugaaccgagcgcucaccgggauagcggucgagcaagauaagaauacccaagagguguuugcccaggugaagcaaaucuauaagaccccuccaauaaaggauuuuggcggcuucaauuucucacaaauuuugcccgauccaucuaagccguccaagcgaucauuuauugaggaucugcuguucaacaaagucacucucgccgacgcgggguuuauuaaacaauauggcgauugccugggcgacaucgccgccagggaccuuauaugcgcccagaaguucaacggucucaccgugcugccaccauuguugacugacgaaaugaucgcacaguauacgucagcgcugcuggcugguaccauuacuucuggcuggacauucggagccggugcagcccuucagauuccauuugcaaugcagauggccuauagauuuaauggaauaggagugacgcagaacguauuguacgagaaucaaaaguugaucgcaaaccaguucaauucugccauuggaaagauacaagauucccuuucuucuaccgccucagcccuggguaaguugcaagaugucgucaaccaaaaugcacaggcuuugaauaccuugguaaaacaauugucauccaauuucggcgccauaagcucaguacuuaacgauaucuugucacgauuggauccccccgaagccgagguccaaaucgauaggcucaucacgggacggcuccagagccuucaaaccuaugugacgcaacaacugauacgggccgcagaaauccgagcguccgccaacuuggcagcuaccaagauguccgaauguguacugggucaaucaaagagaguugauuucuguggaaaaggauaccaucucaugucauucccccaaagcgccccgcacggcgucguguuccuccaugugacuuacguuccagcacaagaaaaaaacuucacaacugcgcccgcuaucugccaugacgggaaggcgcacuucccacgagaggguguauuugugucaaauggaacgcacugguucguaacgcaaaggaacuucuaugaaccgcagauaaucacgacugacaacacuuuuguaucuggcaauugugauguggucaucgggauaguuaacaacacugucuaugacccgcugcaacccgagcuugauucauuuaaagaagaacucgauaaauauuucaagaaucacaccagucccgauguggaccuuggagacauuuccgggauaaaugccucugugguaaacauccaaaaggaaaucgaucggcugaaugaaguggccaaaaacuugaacgaaagucugauagaccuucaggagcucgggaaguaugaacaagggagcgguuauauuccugaagcuccaagagaugggcaagcuuacguucguaaagauggcgaauggguacuucuuucuaccuuuuuaugauga

SEQ ID NO: 130 - RNA, 3723 nt, Artificial Sequence
  Description of Artificial Sequence: Synthetic polynucleotide
  pKL056
auguaccgaaugcagcucuuguccugcauugcucucagccuugcacuugugaccaauuccacuacccgcacacagcucccgccggcguacacuaacuccuucacccgggggguuuacuacccggacaaaguguuccgcagcaguguccugcauucaacacaagauuuguuccuuccauucuuuagcaaugucacuugguuccaugcuauacacgugaguggcacuaacggcacuaagcgcuucgauaacccgguucugccguuuaaugauggcguuuacuucgcaaguacugagaaaucaaacauuauacggggguggauauucgguacuacauuggauaguaaaacucaaagccuuuugauugucaacaaugcaacuaauguagucauaaaaguuugugaauuccaauucuguaacgaucccuuucuugguguguauuaccacaagaauaacaaaucauggauggagucugaauuucgaguauacaguagcgccaauaauugcacguuugaguauguaagccagccguuucugauggacuuggaaggaaagcaaggcaacuuuaagaaccucagggaguucguauucaaaaauauagacgguuacuucaagauuuacucaaaacauacaccuaucaacuugguccgagaucucccacaagguuuuucagcgcucgagccauugguggaccugcccaucggaaucaacauuacccgauuccagacacugcuugcacugcaccggaguuaucucacacccggcgacagcucgucugguuggacggcgggagcugccgcuuacuaugucgguuacuugcaaccucggacauuucuucugaaguauaacgaaaacgguacgaucaccgaugccguagacugcgcucucgauccccuuucagagacgaagugcacgcucaaaucauuuacuguggaaaaaggaauuuaucaaacgagcaauuucagggugcaacccacggaguccaucguacgauucccaaacauaacaaaucuuugcccguuuggcgagguuuuuaaugcuacgcgcuuugcaucaguguacgcuuggaauaggaaacgaaucucaaauuguguugcggauuauuccguguuguauaauuccgcaagcuucuccaccuuuaaauguuauggcgugucccccacaaaacuuaacgaucuuugcuuuacaaaugucuaugcggauucauucguuauccgaggggaugaagugcgacaaaucgcuccugggcagacagggaagauagcugauuacaauuacaaacuuccagacgauuuuacaggauguguaaucgcguggaacucaaacaauuuggacaguaagguugguggcaacuacaauuaucuguauagacuuuucagaaaaaguaaccucaaaccuuucgaacgcgacauuagcacugagauauaccaggccggaucaacuccuuguaacgguguugaagguuucaacuguuacuuuccgcuccaauccuacggcuuucaaccaacgaacggugucggguaccaaccauacagaguugucgucuugaguuuugagcuuuugcacgcaccugcaaccgugugugguccgaagaaaaguacuaaucugguuaaaaauaaaugcgucaauuucaacuuuaauggguugacgggcacaggcgugcugacagaguccaauaaaaaguuuuugcccuuucagcaguuugggagggacaucgccgauacgaccgaugccguccgagauccucaaacccuugaaauauuggacauuacccccuguaguuuuggcgguguaagugugauuacucccggaacgaauacaucuaaccagguagcggugcuuuaucaagaugucaacuguacagagguccccguggcgauucacgccgaucaguugacacccacauggaggguuuacagcacaggauccaacgucuuccagacgagagcaggaugcuugaucggugccgagcaugugaauaacagcuacgaaugugacauuccgauuggugcuggaaucugcgcaaguuaccaaacucaaacgaauuccccuggcuccgccuccucuguggcaucccagucuauaaucgcguauacgaugucacugggcgccgagaauucugucgcauauagcaacaacuccaucgcaauacccacaaauuuuacaauuucugugaccacggaaauucugcccgucagcaugacaaaaacuagcguggacugcacgauguauaucugcggcgacuccacagaguguuccaaccuccucuugcaauauggcagcuuuugcacacaauugaaccgagcgcucaccgggauagcggucgagcaagauaagaauacccaagagguguuugcccaggugaagcaaaucuauaagaccccuccaauaaaggauuuuggcggcuucaauuucucacaaauuuugcccgauccaucuaagccguccaagcgaucauuuauugaggaucugcuguucaacaaagucacucucgccgacgcgggguuuauuaaacaauauggcgauugccugggcgacaucgccgccagggaccuuauaugcgcccagaaguucaacggucucaccgugcugccaccauuguugacugacgaaaugaucgcacaguauacgucagcgcugcuggcugguaccauuacuucuggcuggacauucggagccggugcagcccuucagauuccauuugcaaugcagauggccuauagauuuaauggaauaggagugacgcagaacguauuguacgagaaucaaaaguugaucgcaaaccaguucaauucugccauuggaaagauacaagauucccuuucuucuaccgccucagcccuggguaaguugcaagaugucgucaaccaaaaugcacaggcuuugaauaccuugguaaaacaauugucauccaauuucggcgccauaagcucaguacuuaacgauaucuugucacgauuggauccccccgaagccgagguccaaaucgauaggcucaucacgggacggcuccagagccuucaaaccuaugugacgcaacaacugauacgggccgcagaaauccgagcguccgccaacuuggcagcuaccaagauguccgaauguguacugggucaaucaaagagaguugauuucuguggaaaaggauaccaucucaugucauucccccaaagcgccccgcacggcgucguguuccuccaugugacuuacguuccagcacaagaaaaaaacuucacaacugcgcccgcuaucugccaugacgggaaggcgcacuucccacgagaggguguauuugugucaaauggaacgcacugguucguaacgcaaaggaacuucuaugaaccgcagauaaucacgacugacaacacuuuuguaucuggcaauugugauguggucaucgggauaguuaacaacacugucuaugacccgcugcaacccgagcuugauucauuuaaagaagaacucgauaaauauuucaagaaucacaccagucccgauguggaccuuggagacauuuccgggauaaaugccucugugguaaacauccaaaaggaaaucgaucggcugaaugaaguggccaaaaacuugaacgaaagucugauagaccuucaggagcucgggaaguaugaacaagggagcgguuauauuccugaagcuccaagagaugggcaagcuuacguucguaaagauggcgaauggguacuucuuucuaccuuuuuaugauga

SEQ ID NO: 131 - RNA, 3723 nt, Artificial Sequence
  Description of Artificial Sequence: Synthetic polynucleotide
  pKL057
auggauuggacguggauacuguuccuuguggcugcagccacucgcguucacucaaacuugacuacccgcacacagcucccgccggcguacacuaacuccuucacccgggggguuuacuacccggacaaaguguuccgcagcaguguccugcauucaacacaagauuuguuccuuccauucuuuagcaaugucacuugguuccaugcuauacacgugaguggcacuaacggcacuaagcgcuucgauaacccgguucugccguuuaaugauggcguuuacuucgcaaguacugagaaaucaaacauuauacggggguggauauucgguacuacauuggauaguaaaacucaaagccuuuugauugucaacaaugcaacuaauguagucauaaaaguuugugaauuccaauucuguaacgaucccuuucuugguguguauuaccacaagaauaacaaaucauggauggagucugaauuucgaguauacaguagcgccaauaauugcacguuugaguauguaagccagccguuucugauggacuuggaaggaaagcaaggcaacuuuaagaaccucagggaguucguauucaaaaauauagacgguuacuucaagauuuacucaaaacauacaccuaucaacuugguccgagaucucccacaagguuuuucagcgcucgagccauugguggaccugcccaucggaaucaacauuacccgauuccagacacugcuugcacugcaccggaguuaucucacacccggcgacagcucgucugguuggacggcgggagcugccgcuuacuaugucgguuacuugcaaccucggacauuucuucugaaguauaacgaaaacgguacgaucaccgaugccguagacugcgcucucgauccccuuucagagacgaagugcacgcucaaaucauuuacuguggaaaaaggaauuuaucaaacgagcaauuucagggugcaacccacggaguccaucguacgauucccaaacauaacaaaucuuugcccguuuggcgagguuuuuaaugcuacgcgcuuugcaucaguguacgcuuggaauaggaaacgaaucucaaauuguguugcggauuauuccguguuguauaauuccgcaagcuucuccaccuuuaaauguuauggcgugucccccacaaaacuuaacgaucuuugcuuuacaaaugucuaugcggauucauucguuauccgaggggaugaagugcgacaaaucgcuccugggcagacagggaagauagcugauuacaauuacaaacuuccagacgauuuuacaggauguguaaucgcguggaacucaaacaauuuggacaguaagguugguggcaacuacaauuaucuguauagacuuuucagaaaaaguaaccucaaaccuuucgaacgcgacauuagcacugagauauaccaggccggaucaacuccuuguaacgguguugaagguuucaacuguuacuuuccgcuccaauccuacggcuuucaaccaacgaacggugucggguaccaaccauacagaguugucgucuugaguuuugagcuuuugcacgcaccugcaaccgugugugguccgaagaaaaguacuaaucugguuaaaaauaaaugcgucaauuucaacuuuaauggguugacgggcacaggcgugcugacagaguccaauaaaaaguuuuugcccuuucagcaguuugggagggacaucgccgauacgaccgaugccguccgagauccucaaacccuugaaauauuggacauuacccccuguaguuuuggcgguguaagugugauuacucccggaacgaauacaucuaaccagguagcggugcuuuaucaagaugucaacuguacagagguccccguggcgauucacgccgaucaguugacacccacauggaggguuuacagcacaggauccaacgucuuccagacgagagcaggaugcuugaucggugccgagcaugugaauaacagcuacgaaugugacauuccgauuggugcuggaaucugcgcaaguuaccaaacucaaacgaauuccccuggcuccgccuccucuguggcaucccagucuauaaucgcguauacgaugucacugggcgccgagaauucugucgcauauagcaacaacuccaucgcaauacccacaaauuuuacaauuucugugaccacggaaauucugcccgucagcaugacaaaaacuagcguggacugcacgauguauaucugcggcgacuccacagaguguuccaaccuccucuugcaauauggcagcuuuugcacacaauugaaccgagcgcucaccgggauagcggucgagcaagauaagaauacccaagagguguuugcccaggugaagcaaaucuauaagaccccuccaauaaaggauuuuggcggcuucaauuucucacaaauuuugcccgauccaucuaagccguccaagcgaucauuuauugaggaucugcuguucaacaaagucacucucgccgacgcgggguuuauuaaacaauauggcgauugccugggcgacaucgccgccagggaccuuauaugcgcccagaaguucaacggucucaccgugcugccaccauuguugacugacgaaaugaucgcacaguauacgucagcgcugcuggcugguaccauuacuucuggcuggacauucggagccggugcagcccuucagauuccauuugcaaugcagauggccuauagauuuaauggaauaggagugacgcagaacguauuguacgagaaucaaaaguugaucgcaaaccaguucaauucugccauuggaaagauacaagauucccuuucuucuaccgccucagcccuggguaaguugcaagaugucgucaaccaaaaugcacaggcuuugaauaccuugguaaaacaauugucauccaauuucggcgccauaagcucaguacuuaacgauaucuugucacgauuggauccccccgaagccgagguccaaaucgauaggcucaucacgggacggcuccagagccuucaaaccuaugugacgcaacaacugauacgggccgcagaaauccgagcguccgccaacuuggcagcuaccaagauguccgaauguguacugggucaaucaaagagaguugauuucuguggaaaaggauaccaucucaugucauucccccaaagcgccccgcacggcgucguguuccuccaugugacuuacguuccagcacaagaaaaaaacuucacaacugcgcccgcuaucugccaugacgggaaggcgcacuucccacgagaggguguauuugugucaaauggaacgcacugguucguaacgcaaaggaacuucuaugaaccgcagauaaucacgacugacaacacuuuuguaucuggcaauugugauguggucaucgggauaguuaacaacacugucuaugacccgcugcaacccgagcuugauucauuuaaagaagaacucgauaaauauuucaagaaucacaccagucccgauguggaccuuggagacauuuccgggauaaaugccucugugguaaacauccaaaaggaaaucgaucggcugaaugaaguggccaaaaacuugaacgaaagucugauagaccuucaggagcucgggaaguaugaacaagggagcgguuauauuccugaagcuccaagagaugggcaagcuuacguucguaaagauggcgaauggguacuucuuucuaccuuuuuaugauga

SEQ ID NO: 132 - RNA, 3717 nt, Artificial Sequence
  Description of Artificial Sequence: Synthetic polynucleotide
  pKL058
auggauuggacguggauacuguuccuuguggcugcagccacucgcguucacucaacuacccgcacacagcucccgccggcguacacuaacuccuucacccgggggguuuacuacccggacaaaguguuccgcagcaguguccugcauucaacacaagauuuguuccuuccauucuuuagcaaugucacuugguuccaugcuauacacgugaguggcacuaacggcacuaagcgcuucgauaacccgguucugccguuuaaugauggcguuuacuucgcaaguacugagaaaucaaacauuauacggggguggauauucgguacuacauuggauaguaaaacucaaagccuuuugauugucaacaaugcaacuaauguagucauaaaaguuugugaauuccaauucuguaacgaucccuuucuugguguguauuaccacaagaauaacaaaucauggauggagucugaauuucgaguauacaguagcgccaauaauugcacguuugaguauguaagccagccguuucugauggacuuggaaggaaagcaaggcaacuuuaagaaccucagggaguucguauucaaaaauauagacgguuacuucaagauuuacucaaaacauacaccuaucaacuugguccgagaucucccacaagguuuuucagcgcucgagccauugguggaccugcccaucggaaucaacauuacccgauuccagacacugcuugcacugcaccggaguuaucucacacccggcgacagcucgucugguuggacggcgggagcugccgcuuacuaugucgguuacuugcaaccucggacauuucuucugaaguauaacgaaaacgguacgaucaccgaugccguagacugcgcucucgauccccuuucagagacgaagugcacgcucaaaucauuuacuguggaaaaaggaauuuaucaaacgagcaauuucagggugcaacccacggaguccaucguacgauucccaaacauaacaaaucuuugcccguuuggcgagguuuuuaaugcuacgcgcuuugcaucaguguacgcuuggaauaggaaacgaaucucaaauuguguugcggauuauuccguguuguauaauuccgcaagcuucuccaccuuuaaauguuauggcgugucccccacaaaacuuaacgaucuuugcuuuacaaaugucuaugcggauucauucguuauccgaggggaugaagugcgacaaaucgcuccugggcagacagggaagauagcugauuacaauuacaaacuuccagacgauuuuacaggauguguaaucgcguggaacucaaacaauuuggacaguaagguugguggcaacuacaauuaucuguauagacuuuucagaaaaaguaaccucaaaccuuucgaacgcgacauuagcacugagauauaccaggccggaucaacuccuuguaacgguguugaagguuucaacuguuacuuuccgcuccaauccuacggcuuucaaccaacgaacggugucggguaccaaccauacagaguugucgucuugaguuuugagcuuuugcacgcaccugcaaccgugugugguccgaagaaaaguacuaaucugguuaaaaauaaaugcgucaauuucaacuuuaauggguugacgggcacaggcgugcugacagaguccaauaaaaaguuuuugcccuuucagcaguuugggagggacaucgccgauacgaccgaugccguccgagauccucaaacccuugaaauauuggacauuacccccuguaguuuuggcgguguaagugugauuacucccggaacgaauacaucuaaccagguagcggugcuuuaucaagaugucaacuguacagagguccccguggcgauucacgccgaucaguugacacccacauggaggguuuacagcacaggauccaacgucuuccagacgagagcaggaugcuugaucggugccgagcaugugaauaacagcuacgaaugugacauuccgauuggugcuggaaucugcgcaaguuaccaaacucaaacgaauuccccuggcuccgccuccucuguggcaucccagucuauaaucgcguauacgaugucacugggcgccgagaauucugucgcauauagcaacaacuccaucgcaauacccacaaauuuuacaauuucugugaccacggaaauucugcccgucagcaugacaaaaacuagcguggacugcacgauguauaucugcggcgacuccacagaguguuccaaccuccucuugcaauauggcagcuuuugcacacaauugaaccgagcgcucaccgggauagcggucgagcaagauaagaauacccaagagguguuugcccaggugaagcaaaucuauaagaccccuccaauaaaggauuuuggcggcuucaauuucucacaaauuuugcccgauccaucuaagccguccaagcgaucauuuauugaggaucugcuguucaacaaagucacucucgccgacgcgggguuuauuaaacaauauggcgauugccugggcgacaucgccgccagggaccuuauaugcgcccagaaguucaacggucucaccgugcugccaccauuguugacugacgaaaugaucgcacaguauacgucagcgcugcuggcugguaccauuacuucuggcuggacauucggagccggugcagcccuucagauuccauuugcaaugcagauggccuauagauuuaauggaauaggagugacgcagaacguauuguacgagaaucaaaaguugaucgcaaaccaguucaauucugccauuggaaagauacaagauucccuuucuucuaccgccucagcccuggguaaguugcaagaugucgucaaccaaaaugcacaggcuuugaauaccuugguaaaacaauugucauccaauuucggcgccauaagcucaguacuuaacgauaucuugucacgauuggauccccccgaagccgagguccaaaucgauaggcucaucacgggacggcuccagagccuucaaaccuaugugacgcaacaacugauacgggccgcagaaauccgagcguccgccaacuuggcagcuaccaagauguccgaauguguacugggucaaucaaagagaguugauuucuguggaaaaggauaccaucucaugucauucccccaaagcgccccgcacggcgucguguuccuccaugugacuuacguuccagcacaagaaaaaaacuucacaacugcgcccgcuaucugccaugacgggaaggcgcacuucccacgagaggguguauuugugucaaauggaacgcacugguucguaacgcaaaggaacuucuaugaaccgcagauaaucacgacugacaacacuuuuguaucuggcaauugugauguggucaucgggauaguuaacaacacugucuaugacccgcugcaacccgagcuugauucauuuaaagaagaacucgauaaauauuucaagaaucacaccagucccgauguggaccuuggagacauuuccgggauaaaugccucugugguaaacauccaaaaggaaaucgaucggcugaaugaaguggccaaaaacuugaacgaaagucugauagaccuucaggagcucgggaaguaugaacaagggagcgguuauauuccugaagcuccaagagaugggcaagcuuacguucguaaagauggcgaauggguacuucuuucuaccuuuuuaugauga

SEQ ID NO: 133 - RNA, 3729 nt, Artificial Sequence
  Description of Artificial Sequence: Synthetic polynucleotide
  pKL059
auggaaacuccugcggaguugcuguuccuucugcuucuuuggcucccugauacaacgggaaacuugacuacccgcacacagcucccgccggcguacacuaacuccuucacccgggggguuuacuacccggacaaaguguuccgcagcaguguccugcauucaacacaagauuuguuccuuccauucuuuagcaaugucacuugguuccaugcuauacacgugaguggcacuaacggcacuaagcgcuucgauaacccgguucugccguuuaaugauggcguuuacuucgcaaguacugagaaaucaaacauuauacggggguggauauucgguacuacauuggauaguaaaacucaaagccuuuugauugucaacaaugcaacuaauguagucauaaaaguuugugaauuccaauucuguaacgaucccuuucuugguguguauuaccacaagaauaacaaaucauggauggagucugaauuucgaguauacaguagcgccaauaauugcacguuugaguauguaagccagccguuucugauggacuuggaaggaaagcaaggcaacuuuaagaaccucagggaguucguauucaaaaauauagacgguuacuucaagauuuacucaaaacauacaccuaucaacuugguccgagaucucccacaagguuuuucagcgcucgagccauugguggaccugcccaucggaaucaacauuacccgauuccagacacugcuugcacugcaccggaguuaucucacacccggcgacagcucgucugguuggacggcgggagcugccgcuuacuaugucgguuacuugcaaccucggacauuucuucugaaguauaacgaaaacgguacgaucaccgaugccguagacugcgcucucgauccccuuucagagacgaagugcacgcucaaaucauuuacuguggaaaaaggaauuuaucaaacgagcaauuucagggugcaacccacggaguccaucguacgauucccaaacauaacaaaucuuugcccguuuggcgagguuuuuaaugcuacgcgcuuugcaucaguguacgcuuggaauaggaaacgaaucucaaauuguguugcggauuauuccguguuguauaauuccgcaagcuucuccaccuuuaaauguuauggcgugucccccacaaaacuuaacgaucuuugcuuuacaaaugucuaugcggauucauucguuauccgaggggaugaagugcgacaaaucgcuccugggcagacagggaagauagcugauuacaauuacaaacuuccagacgauuuuacaggauguguaaucgcguggaacucaaacaauuuggacaguaagguugguggcaacuacaauuaucuguauagacuuuucagaaaaaguaaccucaaaccuuucgaacgcgacauuagcacugagauauaccaggccggaucaacuccuuguaacgguguugaagguuucaacuguuacuuuccgcuccaauccuacggcuuucaaccaacgaacggugucggguaccaaccauacagaguugucgucuugaguuuugagcuuuugcacgcaccugcaaccgugugugguccgaagaaaaguacuaaucugguuaaaaauaaaugcgucaauuucaacuuuaauggguugacgggcacaggcgugcugacagaguccaauaaaaaguuuuugcccuuucagcaguuugggagggacaucgccgauacgaccgaugccguccgagauccucaaacccuugaaauauuggacauuacccccuguaguuuuggcgguguaagugugauuacucccggaacgaauacaucuaaccagguagcggugcuuuaucaagaugucaacuguacagagguccccguggcgauucacgccgaucaguugacacccacauggaggguuuacagcacaggauccaacgucuuccagacgagagcaggaugcuugaucggugccgagcaugugaauaacagcuacgaaugugacauuccgauuggugcuggaaucugcgcaaguuaccaaacucaaacgaauuccccuggcuccgccuccucuguggcaucccagucuauaaucgcguauacgaugucacugggcgccgagaauucugucgcauauagcaacaacuccaucgcaauacccacaaauuuuacaauuucugugaccacggaaauucugcccgucagcaugacaaaaacuagcguggacugcacgauguauaucugcggcgacuccacagaguguuccaaccuccucuugcaauauggcagcuuuugcacacaauugaaccgagcgcucaccgggauagcggucgagcaagauaagaauacccaagagguguuugcccaggugaagcaaaucuauaagaccccuccaauaaaggauuuuggcggcuucaauuucucacaaauuuugcccgauccaucuaagccguccaagcgaucauuuauugaggaucugcuguucaacaaagucacucucgccgacgcgggguuuauuaaacaauauggcgauugccugggcgacaucgccgccagggaccuuauaugcgcccagaaguucaacggucucaccgugcugccaccauuguugacugacgaaaugaucgcacaguauacgucagcgcugcuggcugguaccauuacuucuggcuggacauucggagccggugcagcccuucagauuccauuugcaaugcagauggccuauagauuuaauggaauaggagugacgcagaacguauuguacgagaaucaaaaguugaucgcaaaccaguucaauucugccauuggaaagauacaagauucccuuucuucuaccgccucagcccuggguaaguugcaagaugucgucaaccaaaaugcacaggcuuugaauaccuugguaaaacaauugucauccaauuucggcgccauaagcucaguacuuaacgauaucuugucacgauuggauccccccgaagccgagguccaaaucgauaggcucaucacgggacggcuccagagccuucaaaccuaugugacgcaacaacugauacgggccgcagaaauccgagcguccgccaacuuggcagcuaccaagauguccgaauguguacugggucaaucaaagagaguugauuucuguggaaaaggauaccaucucaugucauucccccaaagcgccccgcacggcgucguguuccuccaugugacuuacguuccagcacaagaaaaaaacuucacaacugcgcccgcuaucugccaugacgggaaggcgcacuucccacgagaggguguauuugugucaaauggaacgcacugguucguaacgcaaaggaacuucuaugaaccgcagauaaucacgacugacaacacuuuuguaucuggcaauugugauguggucaucgggauaguuaacaacacugucuaugacccgcugcaacccgagcuugauucauuuaaagaagaacucgauaaauauuucaagaaucacaccagucccgauguggaccuuggagacauuuccgggauaaaugccucugugguaaacauccaaaaggaaaucgaucggcugaaugaaguggccaaaaacuugaacgaaagucugauagaccuucaggagcucgggaaguaugaacaagggagcgguuauauuccugaagcuccaagagaugggcaagcuuacguucguaaagauggcgaauggguacuucuuucuaccuuuuuaugauga

SEQ ID NO: 134 - RNA, 3723 nt, Artificial Sequence
  Description of Artificial Sequence: Synthetic polynucleotide
  pKL060
auggaaacuccugcggaguugcuguuccuucugcuucuuuggcucccugauacaacgggaacuacccgcacacagcucccgccggcguacacuaacuccuucacccgggggguuuacuacccggacaaaguguuccgcagcaguguccugcauucaacacaagauuuguuccuuccauucuuuagcaaugucacuugguuccaugcuauacacgugaguggcacuaacggcacuaagcgcuucgauaacccgguucugccguuuaaugauggcguuuacuucgcaaguacugagaaaucaaacauuauacggggguggauauucgguacuacauuggauaguaaaacucaaagccuuuugauugucaacaaugcaacuaauguagucauaaaaguuugugaauuccaauucuguaacgaucccuuucuugguguguauuaccacaagaauaacaaaucauggauggagucugaauuucgaguauacaguagcgccaauaauugcacguuugaguauguaagccagccguuucugauggacuuggaaggaaagcaaggcaacuuuaagaaccucagggaguucguauucaaaaauauagacgguuacuucaagauuuacucaaaacauacaccuaucaacuugguccgagaucucccacaagguuuuucagcgcucgagccauugguggaccugcccaucggaaucaacauuacccgauuccagacacugcuugcacugcaccggaguuaucucacacccggcgacagcucgucugguuggacggcgggagcugccgcuuacuaugucgguuacuugcaaccucggacauuucuucugaaguauaacgaaaacgguacgaucaccgaugccguagacugcgcucucgauccccuuucagagacgaagugcacgcucaaaucauuuacuguggaaaaaggaauuuaucaaacgagcaauuucagggugcaacccacggaguccaucguacgauucccaaacauaacaaaucuuugcccguuuggcgagguuuuuaaugcuacgcgcuuugcaucaguguacgcuuggaauaggaaacgaaucucaaauuguguugcggauuauuccguguuguauaauuccgcaagcuucuccaccuuuaaauguuauggcgugucccccacaaaacuuaacgaucuuugcuuuacaaaugucuaugcggauucauucguuauccgaggggaugaagugcgacaaaucgcuccugggcagacagggaagauagcugauuacaauuacaaacuuccagacgauuuuacaggauguguaaucgcguggaacucaaacaauuuggacaguaagguugguggcaacuacaauuaucuguauagacuuuucagaaaaaguaaccucaaaccuuucgaacgcgacauuagcacugagauauaccaggccggaucaacuccuuguaacgguguugaagguuucaacuguuacuuuccgcuccaauccuacggcuuucaaccaacgaacggugucggguaccaaccauacagaguugucgucuugaguuuugagcuuuugcacgcaccugcaaccgugugugguccgaagaaaaguacuaaucugguuaaaaauaaaugcgucaauuucaacuuuaauggguugacgggcacaggcgugcugacagaguccaauaaaaaguuuuugcccuuucagcaguuugggagggacaucgccgauacgaccgaugccguccgagauccucaaacccuugaaauauuggacauuacccccuguaguuuuggcgguguaagugugauuacucccggaacgaauacaucuaaccagguagcggugcuuuaucaagaugucaacuguacagagguccccguggcgauucacgccgaucaguugacacccacauggaggguuuacagcacaggauccaacgucuuccagacgagagcaggaugcuugaucggugccgagcaugugaauaacagcuacgaaugugacauuccgauuggugcuggaaucugcgcaaguuaccaaacucaaacgaauuccccuggcuccgccuccucuguggcaucccagucuauaaucgcguauacgaugucacugggcgccgagaauucugucgcauauagcaacaacuccaucgcaauacccacaaauuuuacaauuucugugaccacggaaauucugcccgucagcaugacaaaaacuagcguggacugcacgauguauaucugcggcgacuccacagaguguuccaaccuccucuugcaauauggcagcuuuugcacacaauugaaccgagcgcucaccgggauagcggucgagcaagauaagaauacccaagagguguuugcccaggugaagcaaaucuauaagaccccuccaauaaaggauuuuggcggcuucaauuucucacaaauuuugcccgauccaucuaagccguccaagcgaucauuuauugaggaucugcuguucaacaaagucacucucgccgacgcgggguuuauuaaacaauauggcgauugccugggcgacaucgccgccagggaccuuauaugcgcccagaaguucaacggucucaccgugcugccaccauuguugacugacgaaaugaucgcacaguauacgucagcgcugcuggcugguaccauuacuucuggcuggacauucggagccggugcagcccuucagauuccauuugcaaugcagauggccuauagauuuaauggaauaggagugacgcagaacguauuguacgagaaucaaaaguugaucgcaaaccaguucaauucugccauuggaaagauacaagauucccuuucuucuaccgccucagcccuggguaaguugcaagaugucgucaaccaaaaugcacaggcuuugaauaccuugguaaaacaauugucauccaauuucggcgccauaagcucaguacuuaacgauaucuugucacgauuggauccccccgaagccgagguccaaaucgauaggcucaucacgggacggcuccagagccuucaaaccuaugugacgcaacaacugauacgggccgcagaaauccgagcguccgccaacuuggcagcuaccaagauguccgaauguguacugggucaaucaaagagaguugauuucuguggaaaaggauaccaucucaugucauucccccaaagcgccccgcacggcgucguguuccuccaugugacuuacguuccagcacaagaaaaaaacuucacaacugcgcccgcuaucugccaugacgggaaggcgcacuucccacgagaggguguauuugugucaaauggaacgcacugguucguaacgcaaaggaacuucuaugaaccgcagauaaucacgacugacaacacuuuuguaucuggcaauugugauguggucaucgggauaguuaacaacacugucuaugacccgcugcaacccgagcuugauucauuuaaagaagaacucgauaaauauuucaagaaucacaccagucccgauguggaccuuggagacauuuccgggauaaaugccucugugguaaacauccaaaaggaaaucgaucggcugaaugaaguggccaaaaacuugaacgaaagucugauagaccuucaggagcucgggaaguaugaacaagggagcgguuauauuccugaagcuccaagagaugggcaagcuuacguucguaaagauggcgaauggguacuucuuucuaccuuuuuaugauga

SEQ ID NO: 135 - RNA, 3732 nt, Artificial Sequence
  Description of Artificial Sequence: Synthetic polynucleotide
  pKL061
augaacgagggguccaucauguggcucgcguccuuggccguugugauugcaugugccggagcuaacuugacuacccgcacacagcucccgccggcguacacuaacuccuucacccgggggguuuacuacccggacaaaguguuccgcagcaguguccugcauucaacacaagauuuguuccuuccauucuuuagcaaugucacuugguuccaugcuauacacgugaguggcacuaacggcacuaagcgcuucgauaacccgguucugccguuuaaugauggcguuuacuucgcaaguacugagaaaucaaacauuauacggggguggauauucgguacuacauuggauaguaaaacucaaagccuuuugauugucaacaaugcaacuaauguagucauaaaaguuugugaauuccaauucuguaacgaucccuuucuugguguguauuaccacaagaauaacaaaucauggauggagucugaauuucgaguauacaguagcgccaauaauugcacguuugaguauguaagccagccguuucugauggacuuggaaggaaagcaaggcaacuuuaagaaccucagggaguucguauucaaaaauauagacgguuacuucaagauuuacucaaaacauacaccuaucaacuugguccgagaucucccacaagguuuuucagcgcucgagccauugguggaccugcccaucggaaucaacauuacccgauuccagacacugcuugcacugcaccggaguuaucucacacccggcgacagcucgucugguuggacggcgggagcugccgcuuacuaugucgguuacuugcaaccucggacauuucuucugaaguauaacgaaaacgguacgaucaccgaugccguagacugcgcucucgauccccuuucagagacgaagugcacgcucaaaucauuuacuguggaaaaaggaauuuaucaaacgagcaauuucagggugcaacccacggaguccaucguacgauucccaaacauaacaaaucuuugcccguuuggcgagguuuuuaaugcuacgcgcuuugcaucaguguacgcuuggaauaggaaacgaaucucaaauuguguugcggauuauuccguguuguauaauuccgcaagcuucuccaccuuuaaauguuauggcgugucccccacaaaacuuaacgaucuuugcuuuacaaaugucuaugcggauucauucguuauccgaggggaugaagugcgacaaaucgcuccugggcagacagggaagauagcugauuacaauuacaaacuuccagacgauuuuacaggauguguaaucgcguggaacucaaacaauuuggacaguaagguugguggcaacuacaauuaucuguauagacuuuucagaaaaaguaaccucaaaccuuucgaacgcgacauuagcacugagauauaccaggccggaucaacuccuuguaacgguguugaagguuucaacuguuacuuuccgcuccaauccuacggcuuucaaccaacgaacggugucggguaccaaccauacagaguugucgucuugaguuuugagcuuuugcacgcaccugcaaccgugugugguccgaagaaaaguacuaaucugguuaaaaauaaaugcgucaauuucaacuuuaauggguugacgggcacaggcgugcugacagaguccaauaaaaaguuuuugcccuuucagcaguuugggagggacaucgccgauacgaccgaugccguccgagauccucaaacccuugaaauauuggacauuacccccuguaguuuuggcgguguaagugugauuacucccggaacgaauacaucuaaccagguagcggugcuuuaucaagaugucaacuguacagagguccccguggcgauucacgccgaucaguugacacccacauggaggguuuacagcacaggauccaacgucuuccagacgagagcaggaugcuugaucggugccgagcaugugaauaacagcuacgaaugugacauuccgauuggugcuggaaucugcgcaaguuaccaaacucaaacgaauuccccuggcuccgccuccucuguggcaucccagucuauaaucgcguauacgaugucacugggcgccgagaauucugucgcauauagcaacaacuccaucgcaauacccacaaauuuuacaauuucugugaccacggaaauucugcccgucagcaugacaaaaacuagcguggacugcacgauguauaucugcggcgacuccacagaguguuccaaccuccucuugcaauauggcagcuuuugcacacaauugaaccgagcgcucaccgggauagcggucgagcaagauaagaauacccaagagguguuugcccaggugaagcaaaucuauaagaccccuccaauaaaggauuuuggcggcuucaauuucucacaaauuuugcccgauccaucuaagccguccaagcgaucauuuauugaggaucugcuguucaacaaagucacucucgccgacgcgggguuuauuaaacaauauggcgauugccugggcgacaucgccgccagggaccuuauaugcgcccagaaguucaacggucucaccgugcugccaccauuguugacugacgaaaugaucgcacaguauacgucagcgcugcuggcugguaccauuacuucuggcuggacauucggagccggugcagcccuucagauuccauuugcaaugcagauggccuauagauuuaauggaauaggagugacgcagaacguauuguacgagaaucaaaaguugaucgcaaaccaguucaauucugccauuggaaagauacaagauucccuuucuucuaccgccucagcccuggguaaguugcaagaugucgucaaccaaaaugcacaggcuuugaauaccuugguaaaacaauugucauccaauuucggcgccauaagcucaguacuuaacgauaucuugucacgauuggauccccccgaagccgagguccaaaucgauaggcucaucacgggacggcuccagagccuucaaaccuaugugacgcaacaacugauacgggccgcagaaauccgagcguccgccaacuuggcagcuaccaagauguccgaauguguacugggucaaucaaagagaguugauuucuguggaaaaggauaccaucucaugucauucccccaaagcgccccgcacggcgucguguuccuccaugugacuuacguuccagcacaagaaaaaaacuucacaacugcgcccgcuaucugccaugacgggaaggcgcacuucccacgagaggguguauuugugucaaauggaacgcacugguucguaacgcaaaggaacuucuaugaaccgcagauaaucacgacugacaacacuuuuguaucuggcaauugugauguggucaucgggauaguuaacaacacugucuaugacccgcugcaacccgagcuugauucauuuaaagaagaacucgauaaauauuucaagaaucacaccagucccgauguggaccuuggagacauuuccgggauaaaugccucugugguaaacauccaaaaggaaaucgaucggcugaaugaaguggccaaaaacuugaacgaaagucugauagaccuucaggagcucgggaaguaugaacaagggagcgguuauauuccugaagcuccaagagaugggcaagcuuacguucguaaagauggcgaauggguacuucuuucuaccuuuuuaugauga

SEQ ID NO: 136 - RNA, 3726 nt, Artificial Sequence
  Description of Artificial Sequence: Synthetic polynucleotide
  pKL062
augaacgagggguccaucauguggcucgcguccuuggccguugugauugcaugugccggagcuacuacccgcacacagcucccgccggcguacacuaacuccuucacccgggggguuuacuacccggacaaaguguuccgcagcaguguccugcauucaacacaagauuuguuccuuccauucuuuagcaaugucacuugguuccaugcuauacacgugaguggcacuaacggcacuaagcgcuucgauaacccgguucugccguuuaaugauggcguuuacuucgcaaguacugagaaaucaaacauuauacggggguggauauucgguacuacauuggauaguaaaacucaaagccuuuugauugucaacaaugcaacuaauguagucauaaaaguuugugaauuccaauucuguaacgaucccuuucuugguguguauuaccacaagaauaacaaaucauggauggagucugaauuucgaguauacaguagcgccaauaauugcacguuugaguauguaagccagccguuucugauggacuuggaaggaaagcaaggcaacuuuaagaaccucagggaguucguauucaaaaauauagacgguuacuucaagauuuacucaaaacauacaccuaucaacuugguccgagaucucccacaagguuuuucagcgcucgagccauugguggaccugcccaucggaaucaacauuacccgauuccagacacugcuugcacugcaccggaguuaucucacacccggcgacagcucgucugguuggacggcgggagcugccgcuuacuaugucgguuacuugcaaccucggacauuucuucugaaguauaacgaaaacgguacgaucaccgaugccguagacugcgcucucgauccccuuucagagacgaagugcacgcucaaaucauuuacuguggaaaaaggaauuuaucaaacgagcaauuucagggugcaacccacggaguccaucguacgauucccaaacauaacaaaucuuugcccguuuggcgagguuuuuaaugcuacgcgcuuugcaucaguguacgcuuggaauaggaaacgaaucucaaauuguguugcggauuauuccguguuguauaauuccgcaagcuucuccaccuuuaaauguuauggcgugucccccacaaaacuuaacgaucuuugcuuuacaaaugucuaugcggauucauucguuauccgaggggaugaagugcgacaaaucgcuccugggcagacagggaagauagcugauuacaauuacaaacuuccagacgauuuuacaggauguguaaucgcguggaacucaaacaauuuggacaguaagguugguggcaacuacaauuaucuguauagacuuuucagaaaaaguaaccucaaaccuuucgaacgcgacauuagcacugagauauaccaggccggaucaacuccuuguaacgguguugaagguuucaacuguuacuuuccgcuccaauccuacggcuuucaaccaacgaacggugucggguaccaaccauacagaguugucgucuugaguuuugagcuuuugcacgcaccugcaaccgugugugguccgaagaaaaguacuaaucugguuaaaaauaaaugcgucaauuucaacuuuaauggguugacgggcacaggcgugcugacagaguccaauaaaaaguuuuugcccuuucagcaguuugggagggacaucgccgauacgaccgaugccguccgagauccucaaacccuugaaauauuggacauuacccccuguaguuuuggcgguguaagugugauuacucccggaacgaauacaucuaaccagguagcggugcuuuaucaagaugucaacuguacagagguccccguggcgauucacgccgaucaguugacacccacauggaggguuuacagcacaggauccaacgucuuccagacgagagcaggaugcuugaucggugccgagcaugugaauaacagcuacgaaugugacauuccgauuggugcuggaaucugcgcaaguuaccaaacucaaacgaauuccccuggcuccgccuccucuguggcaucccagucuauaaucgcguauacgaugucacugggcgccgagaauucugucgcauauagcaacaacuccaucgcaauacccacaaauuuuacaauuucugugaccacggaaauucugcccgucagcaugacaaaaacuagcguggacugcacgauguauaucugcggcgacuccacagaguguuccaaccuccucuugcaauauggcagcuuuugcacacaauugaaccgagcgcucaccgggauagcggucgagcaagauaagaauacccaagagguguuugcccaggugaagcaaaucuauaagaccccuccaauaaaggauuuuggcggcuucaauuucucacaaauuuugcccgauccaucuaagccguccaagcgaucauuuauugaggaucugcuguucaacaaagucacucucgccgacgcgggguuuauuaaacaauauggcgauugccugggcgacaucgccgccagggaccuuauaugcgcccagaaguucaacggucucaccgugcugccaccauuguugacugacgaaaugaucgcacaguauacgucagcgcugcuggcugguaccauuacuucuggcuggacauucggagccggugcagcccuucagauuccauuugcaaugcagauggccuauagauuuaauggaauaggagugacgcagaacguauuguacgagaaucaaaaguugaucgcaaaccaguucaauucugccauuggaaagauacaagauucccuuucuucuaccgccucagcccuggguaaguugcaagaugucgucaaccaaaaugcacaggcuuugaauaccuugguaaaacaauugucauccaauuucggcgccauaagcucaguacuuaacgauaucuugucacgauuggauccccccgaagccgagguccaaaucgauaggcucaucacgggacggcuccagagccuucaaaccuaugugacgcaacaacugauacgggccgcagaaauccgagcguccgccaacuuggcagcuaccaagauguccgaauguguacugggucaaucaaagagaguugauuucuguggaaaaggauaccaucucaugucauucccccaaagcgccccgcacggcgucguguuccuccaugugacuuacguuccagcacaagaaaaaaacuucacaacugcgcccgcuaucugccaugacgggaaggcgcacuucccacgagaggguguauuugugucaaauggaacgcacugguucguaacgcaaaggaacuucuaugaaccgcagauaaucacgacugacaacacuuuuguaucuggcaauugugauguggucaucgggauaguuaacaacacugucuaugacccgcugcaacccgagcuugauucauuuaaagaagaacucgauaaauauuucaagaaucacaccagucccgauguggaccuuggagacauuuccgggauaaaugccucugugguaaacauccaaaaggaaaucgaucggcugaaugaaguggccaaaaacuugaacgaaagucugauagaccuucaggagcucgggaaguaugaacaagggagcgguuauauuccugaagcuccaagagaugggcaagcuuacguucguaaagauggcgaauggguacuucuuucuaccuuuuuaugauga

SEQ ID NO: 137 - RNA, 3759 nt, Artificial Sequence
  Description of Artificial Sequence: Synthetic polynucleotide
  pKL063
augggcaggaaacaaaacaaaaggggagguaaugaggguuccaucaugugguuggcuucccucgccgugguuauugcgugcgcuggugcuaacuugacuacccgcacacagcucccgccggcguacacuaacuccuucacccgggggguuuacuacccggacaaaguguuccgcagcaguguccugcauucaacacaagauuuguuccuuccauucuuuagcaaugucacuugguuccaugcuauacacgugaguggcacuaacggcacuaagcgcuucgauaacccgguucugccguuuaaugauggcguuuacuucgcaaguacugagaaaucaaacauuauacggggguggauauucgguacuacauuggauaguaaaacucaaagccuuuugauugucaacaaugcaacuaauguagucauaaaaguuugugaauuccaauucuguaacgaucccuuucuugguguguauuaccacaagaauaacaaaucauggauggagucugaauuucgaguauacaguagcgccaauaauugcacguuugaguauguaagccagccguuucugauggacuuggaaggaaagcaaggcaacuuuaagaaccucagggaguucguauucaaaaauauagacgguuacuucaagauuuacucaaaacauacaccuaucaacuugguccgagaucucccacaagguuuuucagcgcucgagccauugguggaccugcccaucggaaucaacauuacccgauuccagacacugcuugcacugcaccggaguuaucucacacccggcgacagcucgucugguuggacggcgggagcugccgcuuacuaugucgguuacuugcaaccucggacauuucuucugaaguauaacgaaaacgguacgaucaccgaugccguagacugcgcucucgauccccuuucagagacgaagugcacgcucaaaucauuuacuguggaaaaaggaauuuaucaaacgagcaauuucagggugcaacccacggaguccaucguacgauucccaaacauaacaaaucuuugcccguuuggcgagguuuuuaaugcuacgcgcuuugcaucaguguacgcuuggaauaggaaacgaaucucaaauuguguugcggauuauuccguguuguauaauuccgcaagcuucuccaccuuuaaauguuauggcgugucccccacaaaacuuaacgaucuuugcuuuacaaaugucuaugcggauucauucguuauccgaggggaugaagugcgacaaaucgcuccugggcagacagggaagauagcugauuacaauuacaaacuuccagacgauuuuacaggauguguaaucgcguggaacucaaacaauuuggacaguaagguugguggcaacuacaauuaucuguauagacuuuucagaaaaaguaaccucaaaccuuucgaacgcgacauuagcacugagauauaccaggccggaucaacuccuuguaacgguguugaagguuucaacuguuacuuuccgcuccaauccuacggcuuucaaccaacgaacggugucggguaccaaccauacagaguugucgucuugaguuuugagcuuuugcacgcaccugcaaccgugugugguccgaagaaaaguacuaaucugguuaaaaauaaaugcgucaauuucaacuuuaauggguugacgggcacaggcgugcugacagaguccaauaaaaaguuuuugcccuuucagcaguuugggagggacaucgccgauacgaccgaugccguccgagauccucaaacccuugaaauauuggacauuacccccuguaguuuuggcgguguaagugugauuacucccggaacgaauacaucuaaccagguagcggugcuuuaucaagaugucaacuguacagagguccccguggcgauucacgccgaucaguugacacccacauggaggguuuacagcacaggauccaacgucuuccagacgagagcaggaugcuugaucggugccgagcaugugaauaacagcuacgaaugugacauuccgauuggugcuggaaucugcgcaaguuaccaaacucaaacgaauuccccuggcuccgccuccucuguggcaucccagucuauaaucgcguauacgaugucacugggcgccgagaauucugucgcauauagcaacaacuccaucgcaauacccacaaauuuuacaauuucugugaccacggaaauucugcccgucagcaugacaaaaacuagcguggacugcacgauguauaucugcggcgacuccacagaguguuccaaccuccucuugcaauauggcagcuuuugcacacaauugaaccgagcgcucaccgggauagcggucgagcaagauaagaauacccaagagguguuugcccaggugaagcaaaucuauaagaccccuccaauaaaggauuuuggcggcuucaauuucucacaaauuuugcccgauccaucuaagccguccaagcgaucauuuauugaggaucugcuguucaacaaagucacucucgccgacgcgggguuuauuaaacaauauggcgauugccugggcgacaucgccgccagggaccuuauaugcgcccagaaguucaacggucucaccgugcugccaccauuguugacugacgaaaugaucgcacaguauacgucagcgcugcuggcugguaccauuacuucuggcuggacauucggagccggugcagcccuucagauuccauuugcaaugcagauggccuauagauuuaauggaauaggagugacgcagaacguauuguacgagaaucaaaaguugaucgcaaaccaguucaauucugccauuggaaagauacaagauucccuuucuucuaccgccucagcccuggguaaguugcaagaugucgucaaccaaaaugcacaggcuuugaauaccuugguaaaacaauugucauccaauuucggcgccauaagcucaguacuuaacgauaucuugucacgauuggauccccccgaagccgagguccaaaucgauaggcucaucacgggacggcuccagagccuucaaaccuaugugacgcaacaacugauacgggccgcagaaauccgagcguccgccaacuuggcagcuaccaagauguccgaauguguacugggucaaucaaagagaguugauuucuguggaaaaggauaccaucucaugucauucccccaaagcgccccgcacggcgucguguuccuccaugugacuuacguuccagcacaagaaaaaaacuucacaacugcgcccgcuaucugccaugacgggaaggcgcacuucccacgagaggguguauuugugucaaauggaacgcacugguucguaacgcaaaggaacuucuaugaaccgcagauaaucacgacugacaacacuuuuguaucuggcaauugugauguggucaucgggauaguuaacaacacugucuaugacccgcugcaacccgagcuugauucauuuaaagaagaacucgauaaauauuucaagaaucacaccagucccgauguggaccuuggagacauuuccgggauaaaugccucugugguaaacauccaaaaggaaaucgaucggcugaaugaaguggccaaaaacuugaacgaaagucugauagaccuucaggagcucgggaaguaugaacaagggagcgguuauauuccugaagcuccaagagaugggcaagcuuacguucguaaagauggcgaauggguacuucuuucuaccuuuuuaugauga

SEQ ID NO: 138 - RNA, 3753 nt, Artificial Sequence
  Description of Artificial Sequence: Synthetic polynucleotide
  pKL064
augggcaggaaacaaaacaaaaggggagguaaugaggguuccaucaugugguuggcuucccucgccgugguuauugcgugcgcuggugcuacuacccgcacacagcucccgccggcguacacuaacuccuucacccgggggguuuacuacccggacaaaguguuccgcagcaguguccugcauucaacacaagauuuguuccuuccauucuuuagcaaugucacuugguuccaugcuauacacgugaguggcacuaacggcacuaagcgcuucgauaacccgguucugccguuuaaugauggcguuuacuucgcaaguacugagaaaucaaacauuauacggggguggauauucgguacuacauuggauaguaaaacucaaagccuuuugauugucaacaaugcaacuaauguagucauaaaaguuugugaauuccaauucuguaacgaucccuuucuugguguguauuaccacaagaauaacaaaucauggauggagucugaauuucgaguauacaguagcgccaauaauugcacguuugaguauguaagccagccguuucugauggacuuggaaggaaagcaaggcaacuuuaagaaccucagggaguucguauucaaaaauauagacgguuacuucaagauuuacucaaaacauacaccuaucaacuugguccgagaucucccacaagguuuuucagcgcucgagccauugguggaccugcccaucggaaucaacauuacccgauuccagacacugcuugcacugcaccggaguuaucucacacccggcgacagcucgucugguuggacggcgggagcugccgcuuacuaugucgguuacuugcaaccucggacauuucuucugaaguauaacgaaaacgguacgaucaccgaugccguagacugcgcucucgauccccuuucagagacgaagugcacgcucaaaucauuuacuguggaaaaaggaauuuaucaaacgagcaauuucagggugcaacccacggaguccaucguacgauucccaaacauaacaaaucuuugcccguuuggcgagguuuuuaaugcuacgcgcuuugcaucaguguacgcuuggaauaggaaacgaaucucaaauuguguugcggauuauuccguguuguauaauuccgcaagcuucuccaccuuuaaauguuauggcgugucccccacaaaacuuaacgaucuuugcuuuacaaaugucuaugcggauucauucguuauccgaggggaugaagugcgacaaaucgcuccugggcagacagggaagauagcugauuacaauuacaaacuuccagacgauuuuacaggauguguaaucgcguggaacucaaacaauuuggacaguaagguugguggcaacuacaauuaucuguauagacuuuucagaaaaaguaaccucaaaccuuucgaacgcgacauuagcacugagauauaccaggccggaucaacuccuuguaacgguguugaagguuucaacuguuacuuuccgcuccaauccuacggcuuucaaccaacgaacggugucggguaccaaccauacagaguugucgucuugaguuuugagcuuuugcacgcaccugcaaccgugugugguccgaagaaaaguacuaaucugguuaaaaauaaaugcgucaauuucaacuuuaauggguugacgggcacaggcgugcugacagaguccaauaaaaaguuuuugcccuuucagcaguuugggagggacaucgccgauacgaccgaugccguccgagauccucaaacccuugaaauauuggacauuacccccuguaguuuuggcgguguaagugugauuacucccggaacgaauacaucuaaccagguagcggugcuuuaucaagaugucaacuguacagagguccccguggcgauucacgccgaucaguugacacccacauggaggguuuacagcacaggauccaacgucuuccagacgagagcaggaugcuugaucggugccgagcaugugaauaacagcuacgaaugugacauuccgauuggugcuggaaucugcgcaaguuaccaaacucaaacgaauuccccuggcuccgccuccucuguggcaucccagucuauaaucgcguauacgaugucacugggcgccgagaauucugucgcauauagcaacaacuccaucgcaauacccacaaauuuuacaauuucugugaccacggaaauucugcccgucagcaugacaaaaacuagcguggacugcacgauguauaucugcggcgacuccacagaguguuccaaccuccucuugcaauauggcagcuuuugcacacaauugaaccgagcgcucaccgggauagcggucgagcaagauaagaauacccaagagguguuugcccaggugaagcaaaucuauaagaccccuccaauaaaggauuuuggcggcuucaauuucucacaaauuuugcccgauccaucuaagccguccaagcgaucauuuauugaggaucugcuguucaacaaagucacucucgccgacgcgggguuuauuaaacaauauggcgauugccugggcgacaucgccgccagggaccuuauaugcgcccagaaguucaacggucucaccgugcugccaccauuguugacugacgaaaugaucgcacaguauacgucagcgcugcuggcugguaccauuacuucuggcuggacauucggagccggugcagcccuucagauuccauuugcaaugcagauggccuauagauuuaauggaauaggagugacgcagaacguauuguacgagaaucaaaaguugaucgcaaaccaguucaauucugccauuggaaagauacaagauucccuuucuucuaccgccucagcccuggguaaguugcaagaugucgucaaccaaaaugcacaggcuuugaauaccuugguaaaacaauugucauccaauuucggcgccauaagcucaguacuuaacgauaucuugucacgauuggauccccccgaagccgagguccaaaucgauaggcucaucacgggacggcuccagagccuucaaaccuaugugacgcaacaacugauacgggccgcagaaauccgagcguccgccaacuuggcagcuaccaagauguccgaauguguacugggucaaucaaagagaguugauuucuguggaaaaggauaccaucucaugucauucccccaaagcgccccgcacggcgucguguuccuccaugugacuuacguuccagcacaagaaaaaaacuucacaacugcgcccgcuaucugccaugacgggaaggcgcacuucccacgagaggguguauuugugucaaauggaacgcacugguucguaacgcaaaggaacuucuaugaaccgcagauaaucacgacugacaacacuuuuguaucuggcaauugugauguggucaucgggauaguuaacaacacugucuaugacccgcugcaacccgagcuugauucauuuaaagaagaacucgauaaauauuucaagaaucacaccagucccgauguggaccuuggagacauuuccgggauaaaugccucugugguaaacauccaaaaggaaaucgaucggcugaaugaaguggccaaaaacuugaacgaaagucugauagaccuucaggagcucgggaaguaugaacaagggagcgguuauauuccugaagcuccaagagaugggcaagcuuacguucguaaagauggcgaauggguacuucuuucuaccuuuuuaugauga

SEQ ID NO: 139 - RNA, 3732 nt, Artificial Sequence
  Description of Artificial Sequence: Synthetic polynucleotide
  pKL065
auggaaacugauacacuguugcuuuggguacuccuccucuggguccccggaaguacaggcgauaacuugacuacccgcacacagcucccgccggcguacacuaacuccuucacccgggggguuuacuacccggacaaaguguuccgcagcaguguccugcauucaacacaagauuuguuccuuccauucuuuagcaaugucacuugguuccaugcuauacacgugaguggcacuaacggcacuaagcgcuucgauaacccgguucugccguuuaaugauggcguuuacuucgcaaguacugagaaaucaaacauuauacggggguggauauucgguacuacauuggauaguaaaacucaaagccuuuugauugucaacaaugcaacuaauguagucauaaaaguuugugaauuccaauucuguaacgaucccuuucuugguguguauuaccacaagaauaacaaaucauggauggagucugaauuucgaguauacaguagcgccaauaauugcacguuugaguauguaagccagccguuucugauggacuuggaaggaaagcaaggcaacuuuaagaaccucagggaguucguauucaaaaauauagacgguuacuucaagauuuacucaaaacauacaccuaucaacuugguccgagaucucccacaagguuuuucagcgcucgagccauugguggaccugcccaucggaaucaacauuacccgauuccagacacugcuugcacugcaccggaguuaucucacacccggcgacagcucgucugguuggacggcgggagcugccgcuuacuaugucgguuacuugcaaccucggacauuucuucugaaguauaacgaaaacgguacgaucaccgaugccguagacugcgcucucgauccccuuucagagacgaagugcacgcucaaaucauuuacuguggaaaaaggaauuuaucaaacgagcaauuucagggugcaacccacggaguccaucguacgauucccaaacauaacaaaucuuugcccguuuggcgagguuuuuaaugcuacgcgcuuugcaucaguguacgcuuggaauaggaaacgaaucucaaauuguguugcggauuauuccguguuguauaauuccgcaagcuucuccaccuuuaaauguuauggcgugucccccacaaaacuuaacgaucuuugcuuuacaaaugucuaugcggauucauucguuauccgaggggaugaagugcgacaaaucgcuccugggcagacagggaagauagcugauuacaauuacaaacuuccagacgauuuuacaggauguguaaucgcguggaacucaaacaauuuggacaguaagguugguggcaacuacaauuaucuguauagacuuuucagaaaaaguaaccucaaaccuuucgaacgcgacauuagcacugagauauaccaggccggaucaacuccuuguaacgguguugaagguuucaacuguuacuuuccgcuccaauccuacggcuuucaaccaacgaacggugucggguaccaaccauacagaguugucgucuugaguuuugagcuuuugcacgcaccugcaaccgugugugguccgaagaaaaguacuaaucugguuaaaaauaaaugcgucaauuucaacuuuaauggguugacgggcacaggcgugcugacagaguccaauaaaaaguuuuugcccuuucagcaguuugggagggacaucgccgauacgaccgaugccguccgagauccucaaacccuugaaauauuggacauuacccccuguaguuuuggcgguguaagugugauuacucccggaacgaauacaucuaaccagguagcggugcuuuaucaagaugucaacuguacagagguccccguggcgauucacgccgaucaguugacacccacauggaggguuuacagcacaggauccaacgucuuccagacgagagcaggaugcuugaucggugccgagcaugugaauaacagcuacgaaugugacauuccgauuggugcuggaaucugcgcaaguuaccaaacucaaacgaauuccccuggcuccgccuccucuguggcaucccagucuauaaucgcguauacgaugucacugggcgccgagaauucugucgcauauagcaacaacuccaucgcaauacccacaaauuuuacaauuucugugaccacggaaauucugcccgucagcaugacaaaaacuagcguggacugcacgauguauaucugcggcgacuccacagaguguuccaaccuccucuugcaauauggcagcuuuugcacacaauugaaccgagcgcucaccgggauagcggucgagcaagauaagaauacccaagagguguuugcccaggugaagcaaaucuauaagaccccuccaauaaaggauuuuggcggcuucaauuucucacaaauuuugcccgauccaucuaagccguccaagcgaucauuuauugaggaucugcuguucaacaaagucacucucgccgacgcgggguuuauuaaacaauauggcgauugccugggcgacaucgccgccagggaccuuauaugcgcccagaaguucaacggucucaccgugcugccaccauuguugacugacgaaaugaucgcacaguauacgucagcgcugcuggcugguaccauuacuucuggcuggacauucggagccggugcagcccuucagauuccauuugcaaugcagauggccuauagauuuaauggaauaggagugacgcagaacguauuguacgagaaucaaaaguugaucgcaaaccaguucaauucugccauuggaaagauacaagauucccuuucuucuaccgccucagcccuggguaaguugcaagaugucgucaaccaaaaugcacaggcuuugaauaccuugguaaaacaauugucauccaauuucggcgccauaagcucaguacuuaacgauaucuugucacgauuggauccccccgaagccgagguccaaaucgauaggcucaucacgggacggcuccagagccuucaaaccuaugugacgcaacaacugauacgggccgcagaaauccgagcguccgccaacuuggcagcuaccaagauguccgaauguguacugggucaaucaaagagaguugauuucuguggaaaaggauaccaucucaugucauucccccaaagcgccccgcacggcgucguguuccuccaugugacuuacguuccagcacaagaaaaaaacuucacaacugcgcccgcuaucugccaugacgggaaggcgcacuucccacgagaggguguauuugugucaaauggaacgcacugguucguaacgcaaaggaacuucuaugaaccgcagauaaucacgacugacaacacuuuuguaucuggcaauugugauguggucaucgggauaguuaacaacacugucuaugacccgcugcaacccgagcuugauucauuuaaagaagaacucgauaaauauuucaagaaucacaccagucccgauguggaccuuggagacauuuccgggauaaaugccucugugguaaacauccaaaaggaaaucgaucggcugaaugaaguggccaaaaacuugaacgaaagucugauagaccuucaggagcucgggaaguaugaacaagggagcgguuauauuccugaagcuccaagagaugggcaagcuuacguucguaaagauggcgaauggguacuucuuucuaccuuuuuaugauga

SEQ ID NO: 140 - RNA, 3726 nt, Artificial Sequence
  Description of Artificial Sequence: Synthetic polynucleotide
  pKL066
auggaaacugauacacuguugcuuuggguacuccuccucuggguccccggaaguacaggcgauacuacccgcacacagcucccgccggcguacacuaacuccuucacccgggggguuuacuacccggacaaaguguuccgcagcaguguccugcauucaacacaagauuuguuccuuccauucuuuagcaaugucacuugguuccaugcuauacacgugaguggcacuaacggcacuaagcgcuucgauaacccgguucugccguuuaaugauggcguuuacuucgcaaguacugagaaaucaaacauuauacggggguggauauucgguacuacauuggauaguaaaacucaaagccuuuugauugucaacaaugcaacuaauguagucauaaaaguuugugaauuccaauucuguaacgaucccuuucuugguguguauuaccacaagaauaacaaaucauggauggagucugaauuucgaguauacaguagcgccaauaauugcacguuugaguauguaagccagccguuucugauggacuuggaaggaaagcaaggcaacuuuaagaaccucagggaguucguauucaaaaauauagacgguuacuucaagauuuacucaaaacauacaccuaucaacuugguccgagaucucccacaagguuuuucagcgcucgagccauugguggaccugcccaucggaaucaacauuacccgauuccagacacugcuugcacugcaccggaguuaucucacacccggcgacagcucgucugguuggacggcgggagcugccgcuuacuaugucgguuacuugcaaccucggacauuucuucugaaguauaacgaaaacgguacgaucaccgaugccguagacugcgcucucgauccccuuucagagacgaagugcacgcucaaaucauuuacuguggaaaaaggaauuuaucaaacgagcaauuucagggugcaacccacggaguccaucguacgauucccaaacauaacaaaucuuugcccguuuggcgagguuuuuaaugcuacgcgcuuugcaucaguguacgcuuggaauaggaaacgaaucucaaauuguguugcggauuauuccguguuguauaauuccgcaagcuucuccaccuuuaaauguuauggcgugucccccacaaaacuuaacgaucuuugcuuuacaaaugucuaugcggauucauucguuauccgaggggaugaagugcgacaaaucgcuccugggcagacagggaagauagcugauuacaauuacaaacuuccagacgauuuuacaggauguguaaucgcguggaacucaaacaauuuggacaguaagguugguggcaacuacaauuaucuguauagacuuuucagaaaaaguaaccucaaaccuuucgaacgcgacauuagcacugagauauaccaggccggaucaacuccuuguaacgguguugaagguuucaacuguuacuuuccgcuccaauccuacggcuuucaaccaacgaacggugucggguaccaaccauacagaguugucgucuugaguuuugagcuuuugcacgcaccugcaaccgugugugguccgaagaaaaguacuaaucugguuaaaaauaaaugcgucaauuucaacuuuaauggguugacgggcacaggcgugcugacagaguccaauaaaaaguuuuugcccuuucagcaguuugggagggacaucgccgauacgaccgaugccguccgagauccucaaacccuugaaauauuggacauuacccccuguaguuuuggcgguguaagugugauuacucccggaacgaauacaucuaaccagguagcggugcuuuaucaagaugucaacuguacagagguccccguggcgauucacgccgaucaguugacacccacauggaggguuuacagcacaggauccaacgucuuccagacgagagcaggaugcuugaucggugccgagcaugugaauaacagcuacgaaugugacauuccgauuggugcuggaaucugcgcaaguuaccaaacucaaacgaauuccccuggcuccgccuccucuguggcaucccagucuauaaucgcguauacgaugucacugggcgccgagaauucugucgcauauagcaacaacuccaucgcaauacccacaaauuuuacaauuucugugaccacggaaauucugcccgucagcaugacaaaaacuagcguggacugcacgauguauaucugcggcgacuccacagaguguuccaaccuccucuugcaauauggcagcuuuugcacacaauugaaccgagcgcucaccgggauagcggucgagcaagauaagaauacccaagagguguuugcccaggugaagcaaaucuauaagaccccuccaauaaaggauuuuggcggcuucaauuucucacaaauuuugcccgauccaucuaagccguccaagcgaucauuuauugaggaucugcuguucaacaaagucacucucgccgacgcgggguuuauuaaacaauauggcgauugccugggcgacaucgccgccagggaccuuauaugcgcccagaaguucaacggucucaccgugcugccaccauuguugacugacgaaaugaucgcacaguauacgucagcgcugcuggcugguaccauuacuucuggcuggacauucggagccggugcagcccuucagauuccauuugcaaugcagauggccuauagauuuaauggaauaggagugacgcagaacguauuguacgagaaucaaaaguugaucgcaaaccaguucaauucugccauuggaaagauacaagauucccuuucuucuaccgccucagcccuggguaaguugcaagaugucgucaaccaaaaugcacaggcuuugaauaccuugguaaaacaauugucauccaauuucggcgccauaagcucaguacuuaacgauaucuugucacgauuggauccccccgaagccgagguccaaaucgauaggcucaucacgggacggcuccagagccuucaaaccuaugugacgcaacaacugauacgggccgcagaaauccgagcguccgccaacuuggcagcuaccaagauguccgaauguguacugggucaaucaaagagaguugauuucuguggaaaaggauaccaucucaugucauucccccaaagcgccccgcacggcgucguguuccuccaugugacuuacguuccagcacaagaaaaaaacuucacaacugcgcccgcuaucugccaugacgggaaggcgcacuucccacgagaggguguauuugugucaaauggaacgcacugguucguaacgcaaaggaacuucuaugaaccgcagauaaucacgacugacaacacuuuuguaucuggcaauugugauguggucaucgggauaguuaacaacacugucuaugacccgcugcaacccgagcuugauucauuuaaagaagaacucgauaaauauuucaagaaucacaccagucccgauguggaccuuggagacauuuccgggauaaaugccucugugguaaacauccaaaaggaaaucgaucggcugaaugaaguggccaaaaacuugaacgaaagucugauagaccuucaggagcucgggaaguaugaacaagggagcgguuauauuccugaagcuccaagagaugggcaagcuuacguucguaaagauggcgaauggguacuucuuucuaccuuuuuaugauga

SEQ ID NO: 141 - RNA, 3732 nt, Artificial Sequence
  Description of Artificial Sequence: Synthetic polynucleotide
  pKL067
augaggccgacucugcuuuggagucuguuguugcuuuuggguguauuugcugcggcagcagccaacuugacuacccgcacacagcucccgccggcguacacuaacuccuucacccgggggguuuacuacccggacaaaguguuccgcagcaguguccugcauucaacacaagauuuguuccuuccauucuuuagcaaugucacuugguuccaugcuauacacgugaguggcacuaacggcacuaagcgcuucgauaacccgguucugccguuuaaugauggcguuuacuucgcaaguacugagaaaucaaacauuauacggggguggauauucgguacuacauuggauaguaaaacucaaagccuuuugauugucaacaaugcaacuaauguagucauaaaaguuugugaauuccaauucuguaacgaucccuuucuugguguguauuaccacaagaauaacaaaucauggauggagucugaauuucgaguauacaguagcgccaauaauugcacguuugaguauguaagccagccguuucugauggacuuggaaggaaagcaaggcaacuuuaagaaccucagggaguucguauucaaaaauauagacgguuacuucaagauuuacucaaaacauacaccuaucaacuugguccgagaucucccacaagguuuuucagcgcucgagccauugguggaccugcccaucggaaucaacauuacccgauuccagacacugcuugcacugcaccggaguuaucucacacccggcgacagcucgucugguuggacggcgggagcugccgcuuacuaugucgguuacuugcaaccucggacauuucuucugaaguauaacgaaaacgguacgaucaccgaugccguagacugcgcucucgauccccuuucagagacgaagugcacgcucaaaucauuuacuguggaaaaaggaauuuaucaaacgagcaauuucagggugcaacccacggaguccaucguacgauucccaaacauaacaaaucuuugcccguuuggcgagguuuuuaaugcuacgcgcuuugcaucaguguacgcuuggaauaggaaacgaaucucaaauuguguugcggauuauuccguguuguauaauuccgcaagcuucuccaccuuuaaauguuauggcgugucccccacaaaacuuaacgaucuuugcuuuacaaaugucuaugcggauucauucguuauccgaggggaugaagugcgacaaaucgcuccugggcagacagggaagauagcugauuacaauuacaaacuuccagacgauuuuacaggauguguaaucgcguggaacucaaacaauuuggacaguaagguugguggcaacuacaauuaucuguauagacuuuucagaaaaaguaaccucaaaccuuucgaacgcgacauuagcacugagauauaccaggccggaucaacuccuuguaacgguguugaagguuucaacuguuacuuuccgcuccaauccuacggcuuucaaccaacgaacggugucggguaccaaccauacagaguugucgucuugaguuuugagcuuuugcacgcaccugcaaccgugugugguccgaagaaaaguacuaaucugguuaaaaauaaaugcgucaauuucaacuuuaauggguugacgggcacaggcgugcugacagaguccaauaaaaaguuuuugcccuuucagcaguuugggagggacaucgccgauacgaccgaugccguccgagauccucaaacccuugaaauauuggacauuacccccuguaguuuuggcgguguaagugugauuacucccggaacgaauacaucuaaccagguagcggugcuuuaucaagaugucaacuguacagagguccccguggcgauucacgccgaucaguugacacccacauggaggguuuacagcacaggauccaacgucuuccagacgagagcaggaugcuugaucggugccgagcaugugaauaacagcuacgaaugugacauuccgauuggugcuggaaucugcgcaaguuaccaaacucaaacgaauuccccuggcuccgccuccucuguggcaucccagucuauaaucgcguauacgaugucacugggcgccgagaauucugucgcauauagcaacaacuccaucgcaauacccacaaauuuuacaauuucugugaccacggaaauucugcccgucagcaugacaaaaacuagcguggacugcacgauguauaucugcggcgacuccacagaguguuccaaccuccucuugcaauauggcagcuuuugcacacaauugaaccgagcgcucaccgggauagcggucgagcaagauaagaauacccaagagguguuugcccaggugaagcaaaucuauaagaccccuccaauaaaggauuuuggcggcuucaauuucucacaaauuuugcccgauccaucuaagccguccaagcgaucauuuauugaggaucugcuguucaacaaagucacucucgccgacgcgggguuuauuaaacaauauggcgauugccugggcgacaucgccgccagggaccuuauaugcgcccagaaguucaacggucucaccgugcugccaccauuguugacugacgaaaugaucgcacaguauacgucagcgcugcuggcugguaccauuacuucuggcuggacauucggagccggugcagcccuucagauuccauuugcaaugcagauggccuauagauuuaauggaauaggagugacgcagaacguauuguacgagaaucaaaaguugaucgcaaaccaguucaauucugccauuggaaagauacaagauucccuuucuucuaccgccucagcccuggguaaguugcaagaugucgucaaccaaaaugcacaggcuuugaauaccuugguaaaacaauugucauccaauuucggcgccauaagcucaguacuuaacgauaucuugucacgauuggauccccccgaagccgagguccaaaucgauaggcucaucacgggacggcuccagagccuucaaaccuaugugacgcaacaacugauacgggccgcagaaauccgagcguccgccaacuuggcagcuaccaagauguccgaauguguacugggucaaucaaagagaguugauuucuguggaaaaggauaccaucucaugucauucccccaaagcgccccgcacggcgucguguuccuccaugugacuuacguuccagcacaagaaaaaaacuucacaacugcgcccgcuaucugccaugacgggaaggcgcacuucccacgagaggguguauuugugucaaauggaacgcacugguucguaacgcaaaggaacuucuaugaaccgcagauaaucacgacugacaacacuuuuguaucuggcaauugugauguggucaucgggauaguuaacaacacugucuaugacccgcugcaacccgagcuugauucauuuaaagaagaacucgauaaauauuucaagaaucacaccagucccgauguggaccuuggagacauuuccgggauaaaugccucugugguaaacauccaaaaggaaaucgaucggcugaaugaaguggccaaaaacuugaacgaaagucugauagaccuucaggagcucgggaaguaugaacaagggagcgguuauauuccugaagcuccaagagaugggcaagcuuacguucguaaagauggcgaauggguacuucuuucuaccuuuuuaugauga

SEQ ID NO: 142 - RNA, 3726 nt, Artificial Sequence
  Description of Artificial Sequence: Synthetic polynucleotide
  pKL068
augaggccgacucugcuuuggagucuguuguugcuuuuggguguauuugcugcggcagcagccacuacccgcacacagcucccgccggcguacacuaacuccuucacccgggggguuuacuacccggacaaaguguuccgcagcaguguccugcauucaacacaagauuuguuccuuccauucuuuagcaaugucacuugguuccaugcuauacacgugaguggcacuaacggcacuaagcgcuucgauaacccgguucugccguuuaaugauggcguuuacuucgcaaguacugagaaaucaaacauuauacggggguggauauucgguacuacauuggauaguaaaacucaaagccuuuugauugucaacaaugcaacuaauguagucauaaaaguuugugaauuccaauucuguaacgaucccuuucuugguguguauuaccacaagaauaacaaaucauggauggagucugaauuucgaguauacaguagcgccaauaauugcacguuugaguauguaagccagccguuucugauggacuuggaaggaaagcaaggcaacuuuaagaaccucagggaguucguauucaaaaauauagacgguuacuucaagauuuacucaaaacauacaccuaucaacuugguccgagaucucccacaagguuuuucagcgcucgagccauugguggaccugcccaucggaaucaacauuacccgauuccagacacugcuugcacugcaccggaguuaucucacacccggcgacagcucgucugguuggacggcgggagcugccgcuuacuaugucgguuacuugcaaccucggacauuucuucugaaguauaacgaaaacgguacgaucaccgaugccguagacugcgcucucgauccccuuucagagacgaagugcacgcucaaaucauuuacuguggaaaaaggaauuuaucaaacgagcaauuucagggugcaacccacggaguccaucguacgauucccaaacauaacaaaucuuugcccguuuggcgagguuuuuaaugcuacgcgcuuugcaucaguguacgcuuggaauaggaaacgaaucucaaauuguguugcggauuauuccguguuguauaauuccgcaagcuucuccaccuuuaaauguuauggcgugucccccacaaaacuuaacgaucuuugcuuuacaaaugucuaugcggauucauucguuauccgaggggaugaagugcgacaaaucgcuccugggcagacagggaagauagcugauuacaauuacaaacuuccagacgauuuuacaggauguguaaucgcguggaacucaaacaauuuggacaguaagguugguggcaacuacaauuaucuguauagacuuuucagaaaaaguaaccucaaaccuuucgaacgcgacauuagcacugagauauaccaggccggaucaacuccuuguaacgguguugaagguuucaacuguuacuuuccgcuccaauccuacggcuuucaaccaacgaacggugucggguaccaaccauacagaguugucgucuugaguuuugagcuuuugcacgcaccugcaaccgugugugguccgaagaaaaguacuaaucugguuaaaaauaaaugcgucaauuucaacuuuaauggguugacgggcacaggcgugcugacagaguccaauaaaaaguuuuugcccuuucagcaguuugggagggacaucgccgauacgaccgaugccguccgagauccucaaacccuugaaauauuggacauuacccccuguaguuuuggcgguguaagugugauuacucccggaacgaauacaucuaaccagguagcggugcuuuaucaagaugucaacuguacagagguccccguggcgauucacgccgaucaguugacacccacauggaggguuuacagcacaggauccaacgucuuccagacgagagcaggaugcuugaucggugccgagcaugugaauaacagcuacgaaugugacauuccgauuggugcuggaaucugcgcaaguuaccaaacucaaacgaauuccccuggcuccgccuccucuguggcaucccagucuauaaucgcguauacgaugucacugggcgccgagaauucugucgcauauagcaacaacuccaucgcaauacccacaaauuuuacaauuucugugaccacggaaauucugcccgucagcaugacaaaaacuagcguggacugcacgauguauaucugcggcgacuccacagaguguuccaaccuccucuugcaauauggcagcuuuugcacacaauugaaccgagcgcucaccgggauagcggucgagcaagauaagaauacccaagagguguuugcccaggugaagcaaaucuauaagaccccuccaauaaaggauuuuggcggcuucaauuucucacaaauuuugcccgauccaucuaagccguccaagcgaucauuuauugaggaucugcuguucaacaaagucacucucgccgacgcgggguuuauuaaacaauauggcgauugccugggcgacaucgccgccagggaccuuauaugcgcccagaaguucaacggucucaccgugcugccaccauuguugacugacgaaaugaucgcacaguauacgucagcgcugcuggcugguaccauuacuucuggcuggacauucggagccggugcagcccuucagauuccauuugcaaugcagauggccuauagauuuaauggaauaggagugacgcagaacguauuguacgagaaucaaaaguugaucgcaaaccaguucaauucugccauuggaaagauacaagauucccuuucuucuaccgccucagcccuggguaaguugcaagaugucgucaaccaaaaugcacaggcuuugaauaccuugguaaaacaauugucauccaauuucggcgccauaagcucaguacuuaacgauaucuugucacgauuggauccccccgaagccgagguccaaaucgauaggcucaucacgggacggcuccagagccuucaaaccuaugugacgcaacaacugauacgggccgcagaaauccgagcguccgccaacuuggcagcuaccaagauguccgaauguguacugggucaaucaaagagaguugauuucuguggaaaaggauaccaucucaugucauucccccaaagcgccccgcacggcgucguguuccuccaugugacuuacguuccagcacaagaaaaaaacuucacaacugcgcccgcuaucugccaugacgggaaggcgcacuucccacgagaggguguauuugugucaaauggaacgcacugguucguaacgcaaaggaacuucuaugaaccgcagauaaucacgacugacaacacuuuuguaucuggcaauugugauguggucaucgggauaguuaacaacacugucuaugacccgcugcaacccgagcuugauucauuuaaagaagaacucgauaaauauuucaagaaucacaccagucccgauguggaccuuggagacauuuccgggauaaaugccucugugguaaacauccaaaaggaaaucgaucggcugaaugaaguggccaaaaacuugaacgaaagucugauagaccuucaggagcucgggaaguaugaacaagggagcgguuauauuccugaagcuccaagagaugggcaagcuuacguucguaaagauggcgaauggguacuucuuucuaccuuuuuaugauga

SEQ ID NO: 143 - RNA, 3726 nt, Artificial Sequence
  Description of Artificial Sequence: Synthetic polynucleotide
  pKL069
auggguguuaaaguguuguuugcuuugauuugcauugcagucgcugaagcaaaaccgaacuugacuacccgcacacagcucccgccggcguacacuaacuccuucacccgggggguuuacuacccggacaaaguguuccgcagcaguguccugcauucaacacaagauuuguuccuuccauucuuuagcaaugucacuugguuccaugcuauacacgugaguggcacuaacggcacuaagcgcuucgauaacccgguucugccguuuaaugauggcguuuacuucgcaaguacugagaaaucaaacauuauacggggguggauauucgguacuacauuggauaguaaaacucaaagccuuuugauugucaacaaugcaacuaauguagucauaaaaguuugugaauuccaauucuguaacgaucccuuucuugguguguauuaccacaagaauaacaaaucauggauggagucugaauuucgaguauacaguagcgccaauaauugcacguuugaguauguaagccagccguuucugauggacuuggaaggaaagcaaggcaacuuuaagaaccucagggaguucguauucaaaaauauagacgguuacuucaagauuuacucaaaacauacaccuaucaacuugguccgagaucucccacaagguuuuucagcgcucgagccauugguggaccugcccaucggaaucaacauuacccgauuccagacacugcuugcacugcaccggaguuaucucacacccggcgacagcucgucugguuggacggcgggagcugccgcuuacuaugucgguuacuugcaaccucggacauuucuucugaaguauaacgaaaacgguacgaucaccgaugccguagacugcgcucucgauccccuuucagagacgaagugcacgcucaaaucauuuacuguggaaaaaggaauuuaucaaacgagcaauuucagggugcaacccacggaguccaucguacgauucccaaacauaacaaaucuuugcccguuuggcgagguuuuuaaugcuacgcgcuuugcaucaguguacgcuuggaauaggaaacgaaucucaaauuguguugcggauuauuccguguuguauaauuccgcaagcuucuccaccuuuaaauguuauggcgugucccccacaaaacuuaacgaucuuugcuuuacaaaugucuaugcggauucauucguuauccgaggggaugaagugcgacaaaucgcuccugggcagacagggaagauagcugauuacaauuacaaacuuccagacgauuuuacaggauguguaaucgcguggaacucaaacaauuuggacaguaagguugguggcaacuacaauuaucuguauagacuuuucagaaaaaguaaccucaaaccuuucgaacgcgacauuagcacugagauauaccaggccggaucaacuccuuguaacgguguugaagguuucaacuguuacuuuccgcuccaauccuacggcuuucaaccaacgaacggugucggguaccaaccauacagaguugucgucuugaguuuugagcuuuugcacgcaccugcaaccgugugugguccgaagaaaaguacuaaucugguuaaaaauaaaugcgucaauuucaacuuuaauggguugacgggcacaggcgugcugacagaguccaauaaaaaguuuuugcccuuucagcaguuugggagggacaucgccgauacgaccgaugccguccgagauccucaaacccuugaaauauuggacauuacccccuguaguuuuggcgguguaagugugauuacucccggaacgaauacaucuaaccagguagcggugcuuuaucaagaugucaacuguacagagguccccguggcgauucacgccgaucaguugacacccacauggaggguuuacagcacaggauccaacgucuuccagacgagagcaggaugcuugaucggugccgagcaugugaauaacagcuacgaaugugacauuccgauuggugcuggaaucugcgcaaguuaccaaacucaaacgaauuccccuggcuccgccuccucuguggcaucccagucuauaaucgcguauacgaugucacugggcgccgagaauucugucgcauauagcaacaacuccaucgcaauacccacaaauuuuacaauuucugugaccacggaaauucugcccgucagcaugacaaaaacuagcguggacugcacgauguauaucugcggcgacuccacagaguguuccaaccuccucuugcaauauggcagcuuuugcacacaauugaaccgagcgcucaccgggauagcggucgagcaagauaagaauacccaagagguguuugcccaggugaagcaaaucuauaagaccccuccaauaaaggauuuuggcggcuucaauuucucacaaauuuugcccgauccaucuaagccguccaagcgaucauuuauugaggaucugcuguucaacaaagucacucucgccgacgcgggguuuauuaaacaauauggcgauugccugggcgacaucgccgccagggaccuuauaugcgcccagaaguucaacggucucaccgugcugccaccauuguugacugacgaaaugaucgcacaguauacgucagcgcugcuggcugguaccauuacuucuggcuggacauucggagccggugcagcccuucagauuccauuugcaaugcagauggccuauagauuuaauggaauaggagugacgcagaacguauuguacgagaaucaaaaguugaucgcaaaccaguucaauucugccauuggaaagauacaagauucccuuucuucuaccgccucagcccuggguaaguugcaagaugucgucaaccaaaaugcacaggcuuugaauaccuugguaaaacaauugucauccaauuucggcgccauaagcucaguacuuaacgauaucuugucacgauuggauccccccgaagccgagguccaaaucgauaggcucaucacgggacggcuccagagccuucaaaccuaugugacgcaacaacugauacgggccgcagaaauccgagcguccgccaacuuggcagcuaccaagauguccgaauguguacugggucaaucaaagagaguugauuucuguggaaaaggauaccaucucaugucauucccccaaagcgccccgcacggcgucguguuccuccaugugacuuacguuccagcacaagaaaaaaacuucacaacugcgcccgcuaucugccaugacgggaaggcgcacuucccacgagaggguguauuugugucaaauggaacgcacugguucguaacgcaaaggaacuucuaugaaccgcagauaaucacgacugacaacacuuuuguaucuggcaauugugauguggucaucgggauaguuaacaacacugucuaugacccgcugcaacccgagcuugauucauuuaaagaagaacucgauaaauauuucaagaaucacaccagucccgauguggaccuuggagacauuuccgggauaaaugccucugugguaaacauccaaaaggaaaucgaucggcugaaugaaguggccaaaaacuugaacgaaagucugauagaccuucaggagcucgggaaguaugaacaagggagcgguuauauuccugaagcuccaagagaugggcaagcuuacguucguaaagauggcgaauggguacuucuuucuaccuuuuuaugauga

SEQ ID NO: 144 - RNA, 3720 nt, Artificial Sequence
  Description of Artificial Sequence: Synthetic polynucleotide
  pKL070
auggguguuaaaguguuguuugcuuugauuugcauugcagucgcugaagcaaaaccgacuacccgcacacagcucccgccggcguacacuaacuccuucacccgggggguuuacuacccggacaaaguguuccgcagcaguguccugcauucaacacaagauuuguuccuuccauucuuuagcaaugucacuugguuccaugcuauacacgugaguggcacuaacggcacuaagcgcuucgauaacccgguucugccguuuaaugauggcguuuacuucgcaaguacugagaaaucaaacauuauacggggguggauauucgguacuacauuggauaguaaaacucaaagccuuuugauugucaacaaugcaacuaauguagucauaaaaguuugugaauuccaauucuguaacgaucccuuucuugguguguauuaccacaagaauaacaaaucauggauggagucugaauuucgaguauacaguagcgccaauaauugcacguuugaguauguaagccagccguuucugauggacuuggaaggaaagcaaggcaacuuuaagaaccucagggaguucguauucaaaaauauagacgguuacuucaagauuuacucaaaacauacaccuaucaacuugguccgagaucucccacaagguuuuucagcgcucgagccauugguggaccugcccaucggaaucaacauuacccgauuccagacacugcuugcacugcaccggaguuaucucacacccggcgacagcucgucugguuggacggcgggagcugccgcuuacuaugucgguuacuugcaaccucggacauuucuucugaaguauaacgaaaacgguacgaucaccgaugccguagacugcgcucucgauccccuuucagagacgaagugcacgcucaaaucauuuacuguggaaaaaggaauuuaucaaacgagcaauuucagggugcaacccacggaguccaucguacgauucccaaacauaacaaaucuuugcccguuuggcgagguuuuuaaugcuacgcgcuuugcaucaguguacgcuuggaauaggaaacgaaucucaaauuguguugcggauuauuccguguuguauaauuccgcaagcuucuccaccuuuaaauguuauggcgugucccccacaaaacuuaacgaucuuugcuuuacaaaugucuaugcggauucauucguuauccgaggggaugaagugcgacaaaucgcuccugggcagacagggaagauagcugauuacaauuacaaacuuccagacgauuuuacaggauguguaaucgcguggaacucaaacaauuuggacaguaagguugguggcaacuacaauuaucuguauagacuuuucagaaaaaguaaccucaaaccuuucgaacgcgacauuagcacugagauauaccaggccggaucaacuccuuguaacgguguugaagguuucaacuguuacuuuccgcuccaauccuacggcuuucaaccaacgaacggugucggguaccaaccauacagaguugucgucuugaguuuugagcuuuugcacgcaccugcaaccgugugugguccgaagaaaaguacuaaucugguuaaaaauaaaugcgucaauuucaacuuuaauggguugacgggcacaggcgugcugacagaguccaauaaaaaguuuuugcccuuucagcaguuugggagggacaucgccgauacgaccgaugccguccgagauccucaaacccuugaaauauuggacauuacccccuguaguuuuggcgguguaagugugauuacucccggaacgaauacaucuaaccagguagcggugcuuuaucaagaugucaacuguacagagguccccguggcgauucacgccgaucaguugacacccacauggaggguuuacagcacaggauccaacgucuuccagacgagagcaggaugcuugaucggugccgagcaugugaauaacagcuacgaaugugacauuccgauuggugcuggaaucugcgcaaguuaccaaacucaaacgaauuccccuggcuccgccuccucuguggcaucccagucuauaaucgcguauacgaugucacugggcgccgagaauucugucgcauauagcaacaacuccaucgcaauacccacaaauuuuacaauuucugugaccacggaaauucugcccgucagcaugacaaaaacuagcguggacugcacgauguauaucugcggcgacuccacagaguguuccaaccuccucuugcaauauggcagcuuuugcacacaauugaaccgagcgcucaccgggauagcggucgagcaagauaagaauacccaagagguguuugcccaggugaagcaaaucuauaagaccccuccaauaaaggauuuuggcggcuucaauuucucacaaauuuugcccgauccaucuaagccguccaagcgaucauuuauugaggaucugcuguucaacaaagucacucucgccgacgcgggguuuauuaaacaauauggcgauugccugggcgacaucgccgccagggaccuuauaugcgcccagaaguucaacggucucaccgugcugccaccauuguugacugacgaaaugaucgcacaguauacgucagcgcugcuggcugguaccauuacuucuggcuggacauucggagccggugcagcccuucagauuccauuugcaaugcagauggccuauagauuuaauggaauaggagugacgcagaacguauuguacgagaaucaaaaguugaucgcaaaccaguucaauucugccauuggaaagauacaagauucccuuucuucuaccgccucagcccuggguaaguugcaagaugucgucaaccaaaaugcacaggcuuugaauaccuugguaaaacaauugucauccaauuucggcgccauaagcucaguacuuaacgauaucuugucacgauuggauccccccgaagccgagguccaaaucgauaggcucaucacgggacggcuccagagccuucaaaccuaugugacgcaacaacugauacgggccgcagaaauccgagcguccgccaacuuggcagcuaccaagauguccgaauguguacugggucaaucaaagagaguugauuucuguggaaaaggauaccaucucaugucauucccccaaagcgccccgcacggcgucguguuccuccaugugacuuacguuccagcacaagaaaaaaacuucacaacugcgcccgcuaucugccaugacgggaaggcgcacuucccacgagaggguguauuugugucaaauggaacgcacugguucguaacgcaaaggaacuucuaugaaccgcagauaaucacgacugacaacacuuuuguaucuggcaauugugauguggucaucgggauaguuaacaacacugucuaugacccgcugcaacccgagcuugauucauuuaaagaagaacucgauaaauauuucaagaaucacaccagucccgauguggaccuuggagacauuuccgggauaaaugccucugugguaaacauccaaaaggaaaucgaucggcugaaugaaguggccaaaaacuugaacgaaagucugauagaccuucaggagcucgggaaguaugaacaagggagcgguuauauuccugaagcuccaagagaugggcaagcuuacguucguaaagauggcgaauggguacuucuuucuaccuuuuuaugauga

SEQ ID NO: 145 - RNA, 3828 nt, Artificial Sequence
  Description of Artificial Sequence: Synthetic polynucleotide
  pJW019
auguuuguuuuucuuguucuucugccauuggugucuucccaaugugugaacuugacuacccgcacacagcucccgccggcguacacuaacuccuucacccgggggguuuacuacccggacaaaguguuccgcagcaguguccugcauucaacacaagauuuguuccuuccauucuuuagcaaugucacuugguuccaugcuauacacgugaguggcacuaacggcacuaagcgcuucgauaacccgguucugccguuuaaugauggcguuuacuucgcaaguacugagaaaucaaacauuauacggggguggauauucgguacuacauuggauaguaaaacucaaagccuuuugauugucaacaaugcaacuaauguagucauaaaaguuugugaauuccaauucuguaacgaucccuuucuugguguguauuaccacaagaauaacaaaucauggauggagucugaauuucgaguauacaguagcgccaauaauugcacguuugaguauguaagccagccguuucugauggacuuggaaggaaagcaaggcaacuuuaagaaccucagggaguucguauucaaaaauauagacgguuacuucaagauuuacucaaaacauacaccuaucaacuugguccgagaucucccacaagguuuuucagcgcucgagccauugguggaccugcccaucggaaucaacauuacccgauuccagacacugcuugcacugcaccggaguuaucucacacccggcgacagcucgucugguuggacggcgggagcugccgcuuacuaugucgguuacuugcaaccucggacauuucuucugaaguauaacgaaaacgguacgaucaccgaugccguagacugcgcucucgauccccuuucagagacgaagugcacgcucaaaucauuuacuguggaaaaaggaauuuaucaaacgagcaauuucagggugcaacccacggaguccaucguacgauucccaaacauaacaaaucuuugcccguuuggcgagguuuuuaaugcuacgcgcuuugcaucaguguacgcuuggaauaggaaacgaaucucaaauuguguugcggauuauuccguguuguauaauuccgcaagcuucuccaccuuuaaauguuauggcgugucccccacaaaacuuaacgaucuuugcuuuacaaaugucuaugcggauucauucguuauccgaggggaugaagugcgacaaaucgcuccugggcagacagggaagauagcugauuacaauuacaaacuuccagacgauuuuacaggauguguaaucgcguggaacucaaacaauuuggacaguaagguugguggcaacuacaauuaucuguauagacuuuucagaaaaaguaaccucaaaccuuucgaacgcgacauuagcacugagauauaccaggccggaucaacuccuuguaacgguguugaagguuucaacuguuacuuuccgcuccaauccuacggcuuucaaccaacgaacggugucggguaccaaccauacagaguugucgucuugaguuuugagcuuuugcacgcaccugcaaccgugugugguccgaagaaaaguacuaaucugguuaaaaauaaaugcgucaauuucaacuuuaauggguugacgggcacaggcgugcugacagaguccaauaaaaaguuuuugcccuuucagcaguuugggagggacaucgccgauacgaccgaugccguccgagauccucaaacccuugaaauauuggacauuacccccuguaguuuuggcgguguaagugugauuacucccggaacgaauacaucuaaccagguagcggugcuuuaucaagaugucaacuguacagagguccccguggcgauucacgccgaucaguugacacccacauggaggguuuacagcacaggauccaacgucuuccagacgagagcaggaugcuugaucggugccgagcaugugaauaacagcuacgaaugugacauuccgauuggugcuggaaucugcgcaaguuaccaaacucaaacgaauuccccuggcuccgccuccucuguggcaucccagucuauaaucgcguauacgaugucacugggcgccgagaauucugucgcauauagcaacaacuccaucgcaauacccacaaauuuuacaauuucugugaccacggaaauucugcccgucagcaugacaaaaacuagcguggacugcacgauguauaucugcggcgacuccacagaguguuccaaccuccucuugcaauauggcagcuuuugcacacaauugaaccgagcgcucaccgggauagcggucgagcaagauaagaauacccaagagguguuugcccaggugaagcaaaucuauaagaccccuccaauaaaggauuuuggcggcuucaauuucucacaaauuuugcccgauccaucuaagccguccaagcgaucauuuauugaggaucugcuguucaacaaagucacucucgccgacgcgggguuuauuaaacaauauggcgauugccugggcgacaucgccgccagggaccuuauaugcgcccagaaguucaacggucucaccgugcugccaccauuguugacugacgaaaugaucgcacaguauacgucagcgcugcuggcugguaccauuacuucuggcuggacauucggagccggugcagcccuucagauuccauuugcaaugcagauggccuauagauuuaauggaauaggagugacgcagaacguauuguacgagaaucaaaaguugaucgcaaaccaguucaauucugccauuggaaagauacaagauucccuuucuucuaccgccucagcccuggguaaguugcaagaugucgucaaccaaaaugcacaggcuuugaauaccuugguaaaacaauugucauccaauuucggcgccauaagcucaguacuuaacgauaucuugucacgauuggauccccccgaagccgagguccaaaucgauaggcucaucacgggacggcuccagagccuucaaaccuaugugacgcaacaacugauacgggccgcagaaauccgagcguccgccaacuuggcagcuaccaagauguccgaauguguacugggucaaucaaagagaguugauuucuguggaaaaggauaccaucucaugucauucccccaaagcgccccgcacggcgucguguuccuccaugugacuuacguuccagcacaagaaaaaaacuucacaacugcgcccgcuaucugccaugacgggaaggcgcacuucccacgagaggguguauuugugucaaauggaacgcacugguucguaacgcaaaggaacuucuaugaaccgcagauaaucacgacugacaacacuuuuguaucuggcaauugugauguggucaucgggauaguuaacaacacugucuaugacccgcugcaacccgagcuugauucauuuaaagaagaacucgauaaauauuucaagaaucacaccagucccgauguggaccuuggagacauuuccgggauaaaugccucugugguaaacauccaaaaggaaaucgaucggcugaaugaaguggccaaaaacuugaacgaaagucugauagaccuucaggagcucgggaaguaugaacaauacauaaaguggccaugguacaucuggcuuggguucaucgcuggccucauagccaucguuaugguuaccaucaugcucugcuguaugacuuccuguuguuccugucucaaaggguguugcagcugugguagcugcugcaaauuugacgaggaugacucagaacccgucuugaagggagucaaguugcacuacacuuagugauaa

SEQ ID NO: 146 - RNA, 3828 nt, Artificial Sequence
  Description of Artificial Sequence: Synthetic polynucleotide
  pKL025
auguuuguuuuucuuguucuucugccauuggugucuucccaaugugugaacuugacuacccgcacacagcucccgccggcguacacuaacuccuucacccgggggguuuacuacccggacaaaguguuccgcagcaguguccugcauucaacacaagauuuguuccuuccauucuuuagcaaugucacuugguuccaugcuauacacgugaguggcacuaacggcacuaagcgcuucgauaacccgguucugccguuuaaugauggcguuuacuucgcaaguacugagaaaucaaacauuauacggggguggauauucgguacuacauuggauaguaaaacucaaagccuuuugauugucaacaaugcaacuaauguagucauaaaaguuugugaauuccaauucuguaacgaucccuuucuugguguguauuaccacaagaauaacaaaucauggauggagucugaauuucgaguauacaguagcgccaauaauugcacguuugaguauguaagccagccguuucugauggacuuggaaggaaagcaaggcaacuuuaagaaccucagggaguucguauucaaaaauauagacgguuacuucaagauuuacucaaaacauacaccuaucaacuugguccgagaucucccacaagguuuuucagcgcucgagccauugguggaccugcccaucggaaucaacauuacccgauuccagacacugcuugcacugcaccggaguuaucucacacccggcgacagcucgucugguuggacggcgggagcugccgcuuacuaugucgguuacuugcaaccucggacauuucuucugaaguauaacgaaaacgguacgaucaccgaugccguagacugcgcucucgauccccuuucagagacgaagugcacgcucaaaucauuuacuguggaaaaaggaauuuaucaaacgagcaauuucagggugcaacccacggaguccaucguacgauucccaaacauaacaaaucuuugcccguuuggcgagguuuuuaaugcuacgcgcuuugcaucaguguacgcuuggaauaggaaacgaaucucaaauuguguugcggauuauuccguguuguauaauuccgcaagcuucuccaccuuuaaauguuauggcgugucccccacaaaacuuaacgaucuuugcuuuacaaaugucuaugcggauucauucguuauccgaggggaugaagugcgacaaaucgcuccugggcagacagggaagauagcugauuacaauuacaaacuuccagacgauuuuacaggauguguaaucgcguggaacucaaacaauuuggacaguaagguugguggcaacuacaauuaucuguauagacuuuucagaaaaaguaaccucaaaccuuucgaacgcgacauuagcacugagauauaccaggccggaucaacuccuuguaacgguguugaagguuucaacuguuacuuuccgcuccaauccuacggcuuucaaccaacgaacggugucggguaccaaccauacagaguugucgucuugaguuuugagcuuuugcacgcaccugcaaccgugugugguccgaagaaaaguacuaaucugguuaaaaauaaaugcgucaauuucaacuuuaauggguugacgggcacaggcgugcugacagaguccaauaaaaaguuuuugcccuuucagcaguuugggagggacaucgccgauacgaccgaugccguccgagauccucaaacccuugaaauauuggacauuacccccuguaguuuuggcgguguaagugugauuacucccggaacgaauacaucuaaccagguagcggugcuuuaucaagaugucaacuguacagagguccccguggcgauucacgccgaucaguugacacccacauggaggguuuacagcacaggauccaacgucuuccagacgagagcaggaugcuugaucggugccgagcaugugaauaacagcuacgaaugugacauuccgauuggugcuggaaucugcgcaaguuaccaaacucaaacgaauuccccuggcuccgccuccucuguggcaucccagucuauaaucgcguauacgaugucacugggcgccgagaauucugucgcauauagcaacaacuccaucgcaauacccacaaauuuuacaauuucugugaccacggaaauucugcccgucagcaugacaaaaacuagcguggacugcacgauguauaucugcggcgacuccacagaguguuccaaccuccucuugcaauauggcagcuuuugcacacaauugaaccgagcgcucaccgggauagcggucgagcaagauaagaauacccaagagguguuugcccaggugaagcaaaucuauaagaccccuccaauaaaggauuuuggcggcuucaauuucucacaaauuuugcccgauccaucuaagccguccaagcgaucauuuauugaggaucugcuguucaacaaagucacucucgccgacgcgggguuuauuaaacaauauggcgauugccugggcgacaucgccgccagggaccuuauaugcgcccagaaguucaacggucucaccgugcugccaccauuguugacugacgaaaugaucgcacaguauacgucagcgcugcuggcugguaccauuacuucuggcuggacauucggagccggugcagcccuucagauuccauuugcaaugcagauggccuauagauuuaauggaauaggagugacgcagaacguauuguacgagaaucaaaaguugaucgcaaaccaguucaauucugccauuggaaagauacaagauucccuuucuucuaccgccucagcccuggguaaguugcaagaugucgucaaccaaaaugcacaggcuuugaauaccuugguaaaacaauugucauccaauuucggcgccauaagcucaguacuuaacgauaucuugucacgauuggauccccccgaagccgagguccaaaucgauaggcucaucacgggacggcuccagagccuucaaaccuaugugacgcaacaacugauacgggccgcagaaauccgagcguccgccaacuuggcagcuaccaagauguccgaauguguacugggucaaucaaagagaguugauuucuguggaaaaggauaccaucucaugucauucccccaaagcgccccgcacggcgucguguuccuccaugugacuuacguuccagcacaagaaaaaaacuucacaacugcgcccgcuaucugccaugacgggaaggcgcacuucccacgagaggguguauuugugucaaauggaacgcacugguucguaacgcaaaggaacuucuaugaaccgcagauaaucacgacugacaacacuuuuguaucuggcaauugugauguggucaucgggauaguuaacaacacugucuaugacccgcugcaacccgagcuugauucauuuaaagaagaacucgauaaauauuucaagaaucacaccagucccgauguggaccuuggagacauuuccgggauaaaugccucugugguaaacauccaaaaggaaaucgaucggcugaaugaaguggccaaaaacuugaacgaaagucugauagaccuucaggagcucgggaaguaugaacaauacauaaaguggccaugguacaucuggcuuggguucaucgcuggccucauagccaucguuaugguuaccaucaugcucugcuguaugacuuccuguuguuccugucucaaaggguguugcagcugugguagcugcugcaaauuugacgaggaugacucagaacccgucuugaagggagucgcguuggccuacacuuagugauaa

SEQ ID NO: 147 - RNA, 3789 nt, Artificial Sequence
  Description of Artificial Sequence: Synthetic polynucleotide
  pKL026
auguuuguuuuucuuguucuucugccauuggugucuucccaaugugugaacuugacuacccgcacacagcucccgccggcguacacuaacuccuucacccgggggguuuacuacccggacaaaguguuccgcagcaguguccugcauucaacacaagauuuguuccuuccauucuuuagcaaugucacuugguuccaugcuauacacgugaguggcacuaacggcacuaagcgcuucgauaacccgguucugccguuuaaugauggcguuuacuucgcaaguacugagaaaucaaacauuauacggggguggauauucgguacuacauuggauaguaaaacucaaagccuuuugauugucaacaaugcaacuaauguagucauaaaaguuugugaauuccaauucuguaacgaucccuuucuugguguguauuaccacaagaauaacaaaucauggauggagucugaauuucgaguauacaguagcgccaauaauugcacguuugaguauguaagccagccguuucugauggacuuggaaggaaagcaaggcaacuuuaagaaccucagggaguucguauucaaaaauauagacgguuacuucaagauuuacucaaaacauacaccuaucaacuugguccgagaucucccacaagguuuuucagcgcucgagccauugguggaccugcccaucggaaucaacauuacccgauuccagacacugcuugcacugcaccggaguuaucucacacccggcgacagcucgucugguuggacggcgggagcugccgcuuacuaugucgguuacuugcaaccucggacauuucuucugaaguauaacgaaaacgguacgaucaccgaugccguagacugcgcucucgauccccuuucagagacgaagugcacgcucaaaucauuuacuguggaaaaaggaauuuaucaaacgagcaauuucagggugcaacccacggaguccaucguacgauucccaaacauaacaaaucuuugcccguuuggcgagguuuuuaaugcuacgcgcuuugcaucaguguacgcuuggaauaggaaacgaaucucaaauuguguugcggauuauuccguguuguauaauuccgcaagcuucuccaccuuuaaauguuauggcgugucccccacaaaacuuaacgaucuuugcuuuacaaaugucuaugcggauucauucguuauccgaggggaugaagugcgacaaaucgcuccugggcagacagggaagauagcugauuacaauuacaaacuuccagacgauuuuacaggauguguaaucgcguggaacucaaacaauuuggacaguaagguugguggcaacuacaauuaucuguauagacuuuucagaaaaaguaaccucaaaccuuucgaacgcgacauuagcacugagauauaccaggccggaucaacuccuuguaacgguguugaagguuucaacuguuacuuuccgcuccaauccuacggcuuucaaccaacgaacggugucggguaccaaccauacagaguugucgucuugaguuuugagcuuuugcacgcaccugcaaccgugugugguccgaagaaaaguacuaaucugguuaaaaauaaaugcgucaauuucaacuuuaauggguugacgggcacaggcgugcugacagaguccaauaaaaaguuuuugcccuuucagcaguuugggagggacaucgccgauacgaccgaugccguccgagauccucaaacccuugaaauauuggacauuacccccuguaguuuuggcgguguaagugugauuacucccggaacgaauacaucuaaccagguagcggugcuuuaucaagaugucaacuguacagagguccccguggcgauucacgccgaucaguugacacccacauggaggguuuacagcacaggauccaacgucuuccagacgagagcaggaugcuugaucggugccgagcaugugaauaacagcuacgaaugugacauuccgauuggugcuggaaucugcgcaaguuaccaaacucaaacgaauuccccuggcuccgccuccucuguggcaucccagucuauaaucgcguauacgaugucacugggcgccgagaauucugucgcauauagcaacaacuccaucgcaauacccacaaauuuuacaauuucugugaccacggaaauucugcccgucagcaugacaaaaacuagcguggacugcacgauguauaucugcggcgacuccacagaguguuccaaccuccucuugcaauauggcagcuuuugcacacaauugaaccgagcgcucaccgggauagcggucgagcaagauaagaauacccaagagguguuugcccaggugaagcaaaucuauaagaccccuccaauaaaggauuuuggcggcuucaauuucucacaaauuuugcccgauccaucuaagccguccaagcgaucauuuauugaggaucugcuguucaacaaagucacucucgccgacgcgggguuuauuaaacaauauggcgauugccugggcgacaucgccgccagggaccuuauaugcgcccagaaguucaacggucucaccgugcugccaccauuguugacugacgaaaugaucgcacaguauacgucagcgcugcuggcugguaccauuacuucuggcuggacauucggagccggugcagcccuucagauuccauuugcaaugcagauggccuauagauuuaauggaauaggagugacgcagaacguauuguacgagaaucaaaaguugaucgcaaaccaguucaauucugccauuggaaagauacaagauucccuuucuucuaccgccucagcccuggguaaguugcaagaugucgucaaccaaaaugcacaggcuuugaauaccuugguaaaacaauugucauccaauuucggcgccauaagcucaguacuuaacgauaucuugucacgauuggauccccccgaagccgagguccaaaucgauaggcucaucacgggacggcuccagagccuucaaaccuaugugacgcaacaacugauacgggccgcagaaauccgagcguccgccaacuuggcagcuaccaagauguccgaauguguacugggucaaucaaagagaguugauuucuguggaaaaggauaccaucucaugucauucccccaaagcgccccgcacggcgucguguuccuccaugugacuuacguuccagcacaagaaaaaaacuucacaacugcgcccgcuaucugccaugacgggaaggcgcacuucccacgagaggguguauuugugucaaauggaacgcacugguucguaacgcaaaggaacuucuaugaaccgcagauaaucacgacugacaacacuuuuguaucuggcaauugugauguggucaucgggauaguuaacaacacugucuaugacccgcugcaacccgagcuugauucauuuaaagaagaacucgauaaauauuucaagaaucacaccagucccgauguggaccuuggagacauuuccgggauaaaugccucugugguaaacauccaaaaggaaaucgaucggcugaaugaaguggccaaaaacuugaacgaaagucugauagaccuucaggagcucgggaaguaugaacaauacauaaaguggccaugguacaucuggcuuggguucaucgcuggccucauagccaucguuaugguuaccaucaugcucugcuguaugacuuccuguuguuccugucucaaaggguguugcagcugugguagcugcugcaaauuugacgaggaugacuagugauaa

SEQ ID NO: 148 - RNA, 3834 nt, Artificial Sequence
  Description of Artificial Sequence: Synthetic polynucleotide
  pKL027
auggguguuaaagugcuuuucgcucuuaucuguauagcugucgcugaggcaaagaacuugacuacccgcacacagcucccgccggcguacacuaacuccuucacccgggggguuuacuacccggacaaaguguuccgcagcaguguccugcauucaacacaagauuuguuccuuccauucuuuagcaaugucacuugguuccaugcuauacacgugaguggcacuaacggcacuaagcgcuucgauaacccgguucugccguuuaaugauggcguuuacuucgcaaguacugagaaaucaaacauuauacggggguggauauucgguacuacauuggauaguaaaacucaaagccuuuugauugucaacaaugcaacuaauguagucauaaaaguuugugaauuccaauucuguaacgaucccuuucuugguguguauuaccacaagaauaacaaaucauggauggagucugaauuucgaguauacaguagcgccaauaauugcacguuugaguauguaagccagccguuucugauggacuuggaaggaaagcaaggcaacuuuaagaaccucagggaguucguauucaaaaauauagacgguuacuucaagauuuacucaaaacauacaccuaucaacuugguccgagaucucccacaagguuuuucagcgcucgagccauugguggaccugcccaucggaaucaacauuacccgauuccagacacugcuugcacugcaccggaguuaucucacacccggcgacagcucgucugguuggacggcgggagcugccgcuuacuaugucgguuacuugcaaccucggacauuucuucugaaguauaacgaaaacgguacgaucaccgaugccguagacugcgcucucgauccccuuucagagacgaagugcacgcucaaaucauuuacuguggaaaaaggaauuuaucaaacgagcaauuucagggugcaacccacggaguccaucguacgauucccaaacauaacaaaucuuugcccguuuggcgagguuuuuaaugcuacgcgcuuugcaucaguguacgcuuggaauaggaaacgaaucucaaauuguguugcggauuauuccguguuguauaauuccgcaagcuucuccaccuuuaaauguuauggcgugucccccacaaaacuuaacgaucuuugcuuuacaaaugucuaugcggauucauucguuauccgaggggaugaagugcgacaaaucgcuccugggcagacagggaagauagcugauuacaauuacaaacuuccagacgauuuuacaggauguguaaucgcguggaacucaaacaauuuggacaguaagguugguggcaacuacaauuaucuguauagacuuuucagaaaaaguaaccucaaaccuuucgaacgcgacauuagcacugagauauaccaggccggaucaacuccuuguaacgguguugaagguuucaacuguuacuuuccgcuccaauccuacggcuuucaaccaacgaacggugucggguaccaaccauacagaguugucgucuugaguuuugagcuuuugcacgcaccugcaaccgugugugguccgaagaaaaguacuaaucugguuaaaaauaaaugcgucaauuucaacuuuaauggguugacgggcacaggcgugcugacagaguccaauaaaaaguuuuugcccuuucagcaguuugggagggacaucgccgauacgaccgaugccguccgagauccucaaacccuugaaauauuggacauuacccccuguaguuuuggcgguguaagugugauuacucccggaacgaauacaucuaaccagguagcggugcuuuaucaagaugucaacuguacagagguccccguggcgauucacgccgaucaguugacacccacauggaggguuuacagcacaggauccaacgucuuccagacgagagcaggaugcuugaucggugccgagcaugugaauaacagcuacgaaugugacauuccgauuggugcuggaaucugcgcaaguuaccaaacucaaacgaauuccccuggcuccgccuccucuguggcaucccagucuauaaucgcguauacgaugucacugggcgccgagaauucugucgcauauagcaacaacuccaucgcaauacccacaaauuuuacaauuucugugaccacggaaauucugcccgucagcaugacaaaaacuagcguggacugcacgauguauaucugcggcgacuccacagaguguuccaaccuccucuugcaauauggcagcuuuugcacacaauugaaccgagcgcucaccgggauagcggucgagcaagauaagaauacccaagagguguuugcccaggugaagcaaaucuauaagaccccuccaauaaaggauuuuggcggcuucaauuucucacaaauuuugcccgauccaucuaagccguccaagcgaucauuuauugaggaucugcuguucaacaaagucacucucgccgacgcgggguuuauuaaacaauauggcgauugccugggcgacaucgccgccagggaccuuauaugcgcccagaaguucaacggucucaccgugcugccaccauuguugacugacgaaaugaucgcacaguauacgucagcgcugcuggcugguaccauuacuucuggcuggacauucggagccggugcagcccuucagauuccauuugcaaugcagauggccuauagauuuaauggaauaggagugacgcagaacguauuguacgagaaucaaaaguugaucgcaaaccaguucaauucugccauuggaaagauacaagauucccuuucuucuaccgccucagcccuggguaaguugcaagaugucgucaaccaaaaugcacaggcuuugaauaccuugguaaaacaauugucauccaauuucggcgccauaagcucaguacuuaacgauaucuugucacgauuggauccccccgaagccgagguccaaaucgauaggcucaucacgggacggcuccagagccuucaaaccuaugugacgcaacaacugauacgggccgcagaaauccgagcguccgccaacuuggcagcuaccaagauguccgaauguguacugggucaaucaaagagaguugauuucuguggaaaaggauaccaucucaugucauucccccaaagcgccccgcacggcgucguguuccuccaugugacuuacguuccagcacaagaaaaaaacuucacaacugcgcccgcuaucugccaugacgggaaggcgcacuucccacgagaggguguauuugugucaaauggaacgcacugguucguaacgcaaaggaacuucuaugaaccgcagauaaucacgacugacaacacuuuuguaucuggcaauugugauguggucaucgggauaguuaacaacacugucuaugacccgcugcaacccgagcuugauucauuuaaagaagaacucgauaaauauuucaagaaucacaccagucccgauguggaccuuggagacauuuccgggauaaaugccucugugguaaacauccaaaaggaaaucgaucggcugaaugaaguggccaaaaacuugaacgaaagucugauagaccuucaggagcucgggaaguaugaacaauacauaaaguggccaugguacaucuggcuuggguucaucgcuggccucauagccaucguuaugguuaccaucaugcucugcuguaugacuuccuguuguuccugucucaaaggguguugcagcugugguagcugcugcaaauuugacgaggaugacucagaacccgucuugaagggagucaaguugcacuacacuuagugauaa

SEQ ID NO: 149 - RNA, 3828 nt, Artificial Sequence
  Description of Artificial Sequence: Synthetic polynucleotide
  pKL028
auggguguuaaagugcuuuucgcucuuaucuguauagcugucgcugaggcaaagacuacccgcacacagcucccgccggcguacacuaacuccuucacccgggggguuuacuacccggacaaaguguuccgcagcaguguccugcauucaacacaagauuuguuccuuccauucuuuagcaaugucacuugguuccaugcuauacacgugaguggcacuaacggcacuaagcgcuucgauaacccgguucugccguuuaaugauggcguuuacuucgcaaguacugagaaaucaaacauuauacggggguggauauucgguacuacauuggauaguaaaacucaaagccuuuugauugucaacaaugcaacuaauguagucauaaaaguuugugaauuccaauucuguaacgaucccuuucuugguguguauuaccacaagaauaacaaaucauggauggagucugaauuucgaguauacaguagcgccaauaauugcacguuugaguauguaagccagccguuucugauggacuuggaaggaaagcaaggcaacuuuaagaaccucagggaguucguauucaaaaauauagacgguuacuucaagauuuacucaaaacauacaccuaucaacuugguccgagaucucccacaagguuuuucagcgcucgagccauugguggaccugcccaucggaaucaacauuacccgauuccagacacugcuugcacugcaccggaguuaucucacacccggcgacagcucgucugguuggacggcgggagcugccgcuuacuaugucgguuacuugcaaccucggacauuucuucugaaguauaacgaaaacgguacgaucaccgaugccguagacugcgcucucgauccccuuucagagacgaagugcacgcucaaaucauuuacuguggaaaaaggaauuuaucaaacgagcaauuucagggugcaacccacggaguccaucguacgauucccaaacauaacaaaucuuugcccguuuggcgagguuuuuaaugcuacgcgcuuugcaucaguguacgcuuggaauaggaaacgaaucucaaauuguguugcggauuauuccguguuguauaauuccgcaagcuucuccaccuuuaaauguuauggcgugucccccacaaaacuuaacgaucuuugcuuuacaaaugucuaugcggauucauucguuauccgaggggaugaagugcgacaaaucgcuccugggcagacagggaagauagcugauuacaauuacaaacuuccagacgauuuuacaggauguguaaucgcguggaacucaaacaauuuggacaguaagguugguggcaacuacaauuaucuguauagacuuuucagaaaaaguaaccucaaaccuuucgaacgcgacauuagcacugagauauaccaggccggaucaacuccuuguaacgguguugaagguuucaacuguuacuuuccgcuccaauccuacggcuuucaaccaacgaacggugucggguaccaaccauacagaguugucgucuugaguuuugagcuuuugcacgcaccugcaaccgugugugguccgaagaaaaguacuaaucugguuaaaaauaaaugcgucaauuucaacuuuaauggguugacgggcacaggcgugcugacagaguccaauaaaaaguuuuugcccuuucagcaguuugggagggacaucgccgauacgaccgaugccguccgagauccucaaacccuugaaauauuggacauuacccccuguaguuuuggcgguguaagugugauuacucccggaacgaauacaucuaaccagguagcggugcuuuaucaagaugucaacuguacagagguccccguggcgauucacgccgaucaguugacacccacauggaggguuuacagcacaggauccaacgucuuccagacgagagcaggaugcuugaucggugccgagcaugugaauaacagcuacgaaugugacauuccgauuggugcuggaaucugcgcaaguuaccaaacucaaacgaauuccccuggcuccgccuccucuguggcaucccagucuauaaucgcguauacgaugucacugggcgccgagaauucugucgcauauagcaacaacuccaucgcaauacccacaaauuuuacaauuucugugaccacggaaauucugcccgucagcaugacaaaaacuagcguggacugcacgauguauaucugcggcgacuccacagaguguuccaaccuccucuugcaauauggcagcuuuugcacacaauugaaccgagcgcucaccgggauagcggucgagcaagauaagaauacccaagagguguuugcccaggugaagcaaaucuauaagaccccuccaauaaaggauuuuggcggcuucaauuucucacaaauuuugcccgauccaucuaagccguccaagcgaucauuuauugaggaucugcuguucaacaaagucacucucgccgacgcgggguuuauuaaacaauauggcgauugccugggcgacaucgccgccagggaccuuauaugcgcccagaaguucaacggucucaccgugcugccaccauuguugacugacgaaaugaucgcacaguauacgucagcgcugcuggcugguaccauuacuucuggcuggacauucggagccggugcagcccuucagauuccauuugcaaugcagauggccuauagauuuaauggaauaggagugacgcagaacguauuguacgagaaucaaaaguugaucgcaaaccaguucaauucugccauuggaaagauacaagauucccuuucuucuaccgccucagcccuggguaaguugcaagaugucgucaaccaaaaugcacaggcuuugaauaccuugguaaaacaauugucauccaauuucggcgccauaagcucaguacuuaacgauaucuugucacgauuggauccccccgaagccgagguccaaaucgauaggcucaucacgggacggcuccagagccuucaaaccuaugugacgcaacaacugauacgggccgcagaaauccgagcguccgccaacuuggcagcuaccaagauguccgaauguguacugggucaaucaaagagaguugauuucuguggaaaaggauaccaucucaugucauucccccaaagcgccccgcacggcgucguguuccuccaugugacuuacguuccagcacaagaaaaaaacuucacaacugcgcccgcuaucugccaugacgggaaggcgcacuucccacgagaggguguauuugugucaaauggaacgcacugguucguaacgcaaaggaacuucuaugaaccgcagauaaucacgacugacaacacuuuuguaucuggcaauugugauguggucaucgggauaguuaacaacacugucuaugacccgcugcaacccgagcuugauucauuuaaagaagaacucgauaaauauuucaagaaucacaccagucccgauguggaccuuggagacauuuccgggauaaaugccucugugguaaacauccaaaaggaaaucgaucggcugaaugaaguggccaaaaacuugaacgaaagucugauagaccuucaggagcucgggaaguaugaacaauacauaaaguggccaugguacaucuggcuuggguucaucgcuggccucauagccaucguuaugguuaccaucaugcucugcuguaugacuuccuguuguuccugucucaaaggguguugcagcugugguagcugcugcaaauuugacgaggaugacucagaacccgucuugaagggagucaaguugcacuacacuuagugauaa

SEQ ID NO: 150 - RNA, 3852 nt, Artificial Sequence
  Description of Artificial Sequence: Synthetic polynucleotide
  pKL029
augccuaugggcucucugcaaccccuugcaacccuuuauuuguuggggaugcuugucgcguccguccucgcgaacuugacuacccgcacacagcucccgccggcguacacuaacuccuucacccgggggguuuacuacccggacaaaguguuccgcagcaguguccugcauucaacacaagauuuguuccuuccauucuuuagcaaugucacuugguuccaugcuauacacgugaguggcacuaacggcacuaagcgcuucgauaacccgguucugccguuuaaugauggcguuuacuucgcaaguacugagaaaucaaacauuauacggggguggauauucgguacuacauuggauaguaaaacucaaagccuuuugauugucaacaaugcaacuaauguagucauaaaaguuugugaauuccaauucuguaacgaucccuuucuugguguguauuaccacaagaauaacaaaucauggauggagucugaauuucgaguauacaguagcgccaauaauugcacguuugaguauguaagccagccguuucugauggacuuggaaggaaagcaaggcaacuuuaagaaccucagggaguucguauucaaaaauauagacgguuacuucaagauuuacucaaaacauacaccuaucaacuugguccgagaucucccacaagguuuuucagcgcucgagccauugguggaccugcccaucggaaucaacauuacccgauuccagacacugcuugcacugcaccggaguuaucucacacccggcgacagcucgucugguuggacggcgggagcugccgcuuacuaugucgguuacuugcaaccucggacauuucuucugaaguauaacgaaaacgguacgaucaccgaugccguagacugcgcucucgauccccuuucagagacgaagugcacgcucaaaucauuuacuguggaaaaaggaauuuaucaaacgagcaauuucagggugcaacccacggaguccaucguacgauucccaaacauaacaaaucuuugcccguuuggcgagguuuuuaaugcuacgcgcuuugcaucaguguacgcuuggaauaggaaacgaaucucaaauuguguugcggauuauuccguguuguauaauuccgcaagcuucuccaccuuuaaauguuauggcgugucccccacaaaacuuaacgaucuuugcuuuacaaaugucuaugcggauucauucguuauccgaggggaugaagugcgacaaaucgcuccugggcagacagggaagauagcugauuacaauuacaaacuuccagacgauuuuacaggauguguaaucgcguggaacucaaacaauuuggacaguaagguugguggcaacuacaauuaucuguauagacuuuucagaaaaaguaaccucaaaccuuucgaacgcgacauuagcacugagauauaccaggccggaucaacuccuuguaacgguguugaagguuucaacuguuacuuuccgcuccaauccuacggcuuucaaccaacgaacggugucggguaccaaccauacagaguugucgucuugaguuuugagcuuuugcacgcaccugcaaccgugugugguccgaagaaaaguacuaaucugguuaaaaauaaaugcgucaauuucaacuuuaauggguugacgggcacaggcgugcugacagaguccaauaaaaaguuuuugcccuuucagcaguuugggagggacaucgccgauacgaccgaugccguccgagauccucaaacccuugaaauauuggacauuacccccuguaguuuuggcgguguaagugugauuacucccggaacgaauacaucuaaccagguagcggugcuuuaucaagaugucaacuguacagagguccccguggcgauucacgccgaucaguugacacccacauggaggguuuacagcacaggauccaacgucuuccagacgagagcaggaugcuugaucggugccgagcaugugaauaacagcuacgaaugugacauuccgauuggugcuggaaucugcgcaaguuaccaaacucaaacgaauuccccuggcuccgccuccucuguggcaucccagucuauaaucgcguauacgaugucacugggcgccgagaauucugucgcauauagcaacaacuccaucgcaauacccacaaauuuuacaauuucugugaccacggaaauucugcccgucagcaugacaaaaacuagcguggacugcacgauguauaucugcggcgacuccacagaguguuccaaccuccucuugcaauauggcagcuuuugcacacaauugaaccgagcgcucaccgggauagcggucgagcaagauaagaauacccaagagguguuugcccaggugaagcaaaucuauaagaccccuccaauaaaggauuuuggcggcuucaauuucucacaaauuuugcccgauccaucuaagccguccaagcgaucauuuauugaggaucugcuguucaacaaagucacucucgccgacgcgggguuuauuaaacaauauggcgauugccugggcgacaucgccgccagggaccuuauaugcgcccagaaguucaacggucucaccgugcugccaccauuguugacugacgaaaugaucgcacaguauacgucagcgcugcuggcugguaccauuacuucuggcuggacauucggagccggugcagcccuucagauuccauuugcaaugcagauggccuauagauuuaauggaauaggagugacgcagaacguauuguacgagaaucaaaaguugaucgcaaaccaguucaauucugccauuggaaagauacaagauucccuuucuucuaccgccucagcccuggguaaguugcaagaugucgucaaccaaaaugcacaggcuuugaauaccuugguaaaacaauugucauccaauuucggcgccauaagcucaguacuuaacgauaucuugucacgauuggauccccccgaagccgagguccaaaucgauaggcucaucacgggacggcuccagagccuucaaaccuaugugacgcaacaacugauacgggccgcagaaauccgagcguccgccaacuuggcagcuaccaagauguccgaauguguacugggucaaucaaagagaguugauuucuguggaaaaggauaccaucucaugucauucccccaaagcgccccgcacggcgucguguuccuccaugugacuuacguuccagcacaagaaaaaaacuucacaacugcgcccgcuaucugccaugacgggaaggcgcacuucccacgagaggguguauuugugucaaauggaacgcacugguucguaacgcaaaggaacuucuaugaaccgcagauaaucacgacugacaacacuuuuguaucuggcaauugugauguggucaucgggauaguuaacaacacugucuaugacccgcugcaacccgagcuugauucauuuaaagaagaacucgauaaauauuucaagaaucacaccagucccgauguggaccuuggagacauuuccgggauaaaugccucugugguaaacauccaaaaggaaaucgaucggcugaaugaaguggccaaaaacuugaacgaaagucugauagaccuucaggagcucgggaaguaugaacaauacauaaaguggccaugguacaucuggcuuggguucaucgcuggccucauagccaucguuaugguuaccaucaugcucugcuguaugacuuccuguuguuccugucucaaaggguguugcagcugugguagcugcugcaaauuugacgaggaugacucagaacccgucuugaagggagucaaguugcacuacacuuagugauaa

SEQ ID NO: 151 - RNA, 3846 nt, Artificial Sequence
  Description of Artificial Sequence: Synthetic polynucleotide
  pKL030
augccuaugggcucucugcaaccccuugcaacccuuuauuuguuggggaugcuugucgcguccguccucgcgacuacccgcacacagcucccgccggcguacacuaacuccuucacccgggggguuuacuacccggacaaaguguuccgcagcaguguccugcauucaacacaagauuuguuccuuccauucuuuagcaaugucacuugguuccaugcuauacacgugaguggcacuaacggcacuaagcgcuucgauaacccgguucugccguuuaaugauggcguuuacuucgcaaguacugagaaaucaaacauuauacggggguggauauucgguacuacauuggauaguaaaacucaaagccuuuugauugucaacaaugcaacuaauguagucauaaaaguuugugaauuccaauucuguaacgaucccuuucuugguguguauuaccacaagaauaacaaaucauggauggagucugaauuucgaguauacaguagcgccaauaauugcacguuugaguauguaagccagccguuucugauggacuuggaaggaaagcaaggcaacuuuaagaaccucagggaguucguauucaaaaauauagacgguuacuucaagauuuacucaaaacauacaccuaucaacuugguccgagaucucccacaagguuuuucagcgcucgagccauugguggaccugcccaucggaaucaacauuacccgauuccagacacugcuugcacugcaccggaguuaucucacacccggcgacagcucgucugguuggacggcgggagcugccgcuuacuaugucgguuacuugcaaccucggacauuucuucugaaguauaacgaaaacgguacgaucaccgaugccguagacugcgcucucgauccccuuucagagacgaagugcacgcucaaaucauuuacuguggaaaaaggaauuuaucaaacgagcaauuucagggugcaacccacggaguccaucguacgauucccaaacauaacaaaucuuugcccguuuggcgagguuuuuaaugcuacgcgcuuugcaucaguguacgcuuggaauaggaaacgaaucucaaauuguguugcggauuauuccguguuguauaauuccgcaagcuucuccaccuuuaaauguuauggcgugucccccacaaaacuuaacgaucuuugcuuuacaaaugucuaugcggauucauucguuauccgaggggaugaagugcgacaaaucgcuccugggcagacagggaagauagcugauuacaauuacaaacuuccagacgauuuuacaggauguguaaucgcguggaacucaaacaauuuggacaguaagguugguggcaacuacaauuaucuguauagacuuuucagaaaaaguaaccucaaaccuuucgaacgcgacauuagcacugagauauaccaggccggaucaacuccuuguaacgguguugaagguuucaacuguuacuuuccgcuccaauccuacggcuuucaaccaacgaacggugucggguaccaaccauacagaguugucgucuugaguuuugagcuuuugcacgcaccugcaaccgugugugguccgaagaaaaguacuaaucugguuaaaaauaaaugcgucaauuucaacuuuaauggguugacgggcacaggcgugcugacagaguccaauaaaaaguuuuugcccuuucagcaguuugggagggacaucgccgauacgaccgaugccguccgagauccucaaacccuugaaauauuggacauuacccccuguaguuuuggcgguguaagugugauuacucccggaacgaauacaucuaaccagguagcggugcuuuaucaagaugucaacuguacagagguccccguggcgauucacgccgaucaguugacacccacauggaggguuuacagcacaggauccaacgucuuccagacgagagcaggaugcuugaucggugccgagcaugugaauaacagcuacgaaugugacauuccgauuggugcuggaaucugcgcaaguuaccaaacucaaacgaauuccccuggcuccgccuccucuguggcaucccagucuauaaucgcguauacgaugucacugggcgccgagaauucugucgcauauagcaacaacuccaucgcaauacccacaaauuuuacaauuucugugaccacggaaauucugcccgucagcaugacaaaaacuagcguggacugcacgauguauaucugcggcgacuccacagaguguuccaaccuccucuugcaauauggcagcuuuugcacacaauugaaccgagcgcucaccgggauagcggucgagcaagauaagaauacccaagagguguuugcccaggugaagcaaaucuauaagaccccuccaauaaaggauuuuggcggcuucaauuucucacaaauuuugcccgauccaucuaagccguccaagcgaucauuuauugaggaucugcuguucaacaaagucacucucgccgacgcgggguuuauuaaacaauauggcgauugccugggcgacaucgccgccagggaccuuauaugcgcccagaaguucaacggucucaccgugcugccaccauuguugacugacgaaaugaucgcacaguauacgucagcgcugcuggcugguaccauuacuucuggcuggacauucggagccggugcagcccuucagauuccauuugcaaugcagauggccuauagauuuaauggaauaggagugacgcagaacguauuguacgagaaucaaaaguugaucgcaaaccaguucaauucugccauuggaaagauacaagauucccuuucuucuaccgccucagcccuggguaaguugcaagaugucgucaaccaaaaugcacaggcuuugaauaccuugguaaaacaauugucauccaauuucggcgccauaagcucaguacuuaacgauaucuugucacgauuggauccccccgaagccgagguccaaaucgauaggcucaucacgggacggcuccagagccuucaaaccuaugugacgcaacaacugauacgggccgcagaaauccgagcguccgccaacuuggcagcuaccaagauguccgaauguguacugggucaaucaaagagaguugauuucuguggaaaaggauaccaucucaugucauucccccaaagcgccccgcacggcgucguguuccuccaugugacuuacguuccagcacaagaaaaaaacuucacaacugcgcccgcuaucugccaugacgggaaggcgcacuucccacgagaggguguauuugugucaaauggaacgcacugguucguaacgcaaaggaacuucuaugaaccgcagauaaucacgacugacaacacuuuuguaucuggcaauugugauguggucaucgggauaguuaacaacacugucuaugacccgcugcaacccgagcuugauucauuuaaagaagaacucgauaaauauuucaagaaucacaccagucccgauguggaccuuggagacauuuccgggauaaaugccucugugguaaacauccaaaaggaaaucgaucggcugaaugaaguggccaaaaacuugaacgaaagucugauagaccuucaggagcucgggaaguaugaacaauacauaaaguggccaugguacaucuggcuuggguucaucgcuggccucauagccaucguuaugguuaccaucaugcucugcuguaugacuuccuguuguuccugucucaaaggguguugcagcugugguagcugcugcaaauuugacgaggaugacucagaacccgucuugaagggagucaaguugcacuacacuuagugauaa

SEQ ID NO: 152 - RNA, 3828 nt, Artificial Sequence
  Description of Artificial Sequence: Synthetic polynucleotide
  pKL031
augccccucuugcuucucuugccacugcugugggcuggggcggcagcuaacuugacuacccgcacacagcucccgccggcguacacuaacuccuucacccgggggguuuacuacccggacaaaguguuccgcagcaguguccugcauucaacacaagauuuguuccuuccauucuuuagcaaugucacuugguuccaugcuauacacgugaguggcacuaacggcacuaagcgcuucgauaacccgguucugccguuuaaugauggcguuuacuucgcaaguacugagaaaucaaacauuauacggggguggauauucgguacuacauuggauaguaaaacucaaagccuuuugauugucaacaaugcaacuaauguagucauaaaaguuugugaauuccaauucuguaacgaucccuuucuugguguguauuaccacaagaauaacaaaucauggauggagucugaauuucgaguauacaguagcgccaauaauugcacguuugaguauguaagccagccguuucugauggacuuggaaggaaagcaaggcaacuuuaagaaccucagggaguucguauucaaaaauauagacgguuacuucaagauuuacucaaaacauacaccuaucaacuugguccgagaucucccacaagguuuuucagcgcucgagccauugguggaccugcccaucggaaucaacauuacccgauuccagacacugcuugcacugcaccggaguuaucucacacccggcgacagcucgucugguuggacggcgggagcugccgcuuacuaugucgguuacuugcaaccucggacauuucuucugaaguauaacgaaaacgguacgaucaccgaugccguagacugcgcucucgauccccuuucagagacgaagugcacgcucaaaucauuuacuguggaaaaaggaauuuaucaaacgagcaauuucagggugcaacccacggaguccaucguacgauucccaaacauaacaaaucuuugcccguuuggcgagguuuuuaaugcuacgcgcuuugcaucaguguacgcuuggaauaggaaacgaaucucaaauuguguugcggauuauuccguguuguauaauuccgcaagcuucuccaccuuuaaauguuauggcgugucccccacaaaacuuaacgaucuuugcuuuacaaaugucuaugcggauucauucguuauccgaggggaugaagugcgacaaaucgcuccugggcagacagggaagauagcugauuacaauuacaaacuuccagacgauuuuacaggauguguaaucgcguggaacucaaacaauuuggacaguaagguugguggcaacuacaauuaucuguauagacuuuucagaaaaaguaaccucaaaccuuucgaacgcgacauuagcacugagauauaccaggccggaucaacuccuuguaacgguguugaagguuucaacuguuacuuuccgcuccaauccuacggcuuucaaccaacgaacggugucggguaccaaccauacagaguugucgucuugaguuuugagcuuuugcacgcaccugcaaccgugugugguccgaagaaaaguacuaaucugguuaaaaauaaaugcgucaauuucaacuuuaauggguugacgggcacaggcgugcugacagaguccaauaaaaaguuuuugcccuuucagcaguuugggagggacaucgccgauacgaccgaugccguccgagauccucaaacccuugaaauauuggacauuacccccuguaguuuuggcgguguaagugugauuacucccggaacgaauacaucuaaccagguagcggugcuuuaucaagaugucaacuguacagagguccccguggcgauucacgccgaucaguugacacccacauggaggguuuacagcacaggauccaacgucuuccagacgagagcaggaugcuugaucggugccgagcaugugaauaacagcuacgaaugugacauuccgauuggugcuggaaucugcgcaaguuaccaaacucaaacgaauuccccuggcuccgccuccucuguggcaucccagucuauaaucgcguauacgaugucacugggcgccgagaauucugucgcauauagcaacaacuccaucgcaauacccacaaauuuuacaauuucugugaccacggaaauucugcccgucagcaugacaaaaacuagcguggacugcacgauguauaucugcggcgacuccacagaguguuccaaccuccucuugcaauauggcagcuuuugcacacaauugaaccgagcgcucaccgggauagcggucgagcaagauaagaauacccaagagguguuugcccaggugaagcaaaucuauaagaccccuccaauaaaggauuuuggcggcuucaauuucucacaaauuuugcccgauccaucuaagccguccaagcgaucauuuauugaggaucugcuguucaacaaagucacucucgccgacgcgggguuuauuaaacaauauggcgauugccugggcgacaucgccgccagggaccuuauaugcgcccagaaguucaacggucucaccgugcugccaccauuguugacugacgaaaugaucgcacaguauacgucagcgcugcuggcugguaccauuacuucuggcuggacauucggagccggugcagcccuucagauuccauuugcaaugcagauggccuauagauuuaauggaauaggagugacgcagaacguauuguacgagaaucaaaaguugaucgcaaaccaguucaauucugccauuggaaagauacaagauucccuuucuucuaccgccucagcccuggguaaguugcaagaugucgucaaccaaaaugcacaggcuuugaauaccuugguaaaacaauugucauccaauuucggcgccauaagcucaguacuuaacgauaucuugucacgauuggauccccccgaagccgagguccaaaucgauaggcucaucacgggacggcuccagagccuucaaaccuaugugacgcaacaacugauacgggccgcagaaauccgagcguccgccaacuuggcagcuaccaagauguccgaauguguacugggucaaucaaagagaguugauuucuguggaaaaggauaccaucucaugucauucccccaaagcgccccgcacggcgucguguuccuccaugugacuuacguuccagcacaagaaaaaaacuucacaacugcgcccgcuaucugccaugacgggaaggcgcacuucccacgagaggguguauuugugucaaauggaacgcacugguucguaacgcaaaggaacuucuaugaaccgcagauaaucacgacugacaacacuuuuguaucuggcaauugugauguggucaucgggauaguuaacaacacugucuaugacccgcugcaacccgagcuugauucauuuaaagaagaacucgauaaauauuucaagaaucacaccagucccgauguggaccuuggagacauuuccgggauaaaugccucugugguaaacauccaaaaggaaaucgaucggcugaaugaaguggccaaaaacuugaacgaaagucugauagaccuucaggagcucgggaaguaugaacaauacauaaaguggccaugguacaucuggcuuggguucaucgcuggccucauagccaucguuaugguuaccaucaugcucugcuguaugacuuccuguuguuccugucucaaaggguguugcagcugugguagcugcugcaaauuugacgaggaugacucagaacccgucuugaagggagucaaguugcacuacacuuagugauaa

SEQ ID NO: 153 - RNA, 3822 nt, Artificial Sequence
  Description of Artificial Sequence: Synthetic polynucleotide
  pKL032
augccccucuugcuucucuugccacugcugugggcuggggcggcagcuacuacccgcacacagcucccgccggcguacacuaacuccuucacccgggggguuuacuacccggacaaaguguuccgcagcaguguccugcauucaacacaagauuuguuccuuccauucuuuagcaaugucacuugguuccaugcuauacacgugaguggcacuaacggcacuaagcgcuucgauaacccgguucugccguuuaaugauggcguuuacuucgcaaguacugagaaaucaaacauuauacggggguggauauucgguacuacauuggauaguaaaacucaaagccuuuugauugucaacaaugcaacuaauguagucauaaaaguuugugaauuccaauucuguaacgaucccuuucuugguguguauuaccacaagaauaacaaaucauggauggagucugaauuucgaguauacaguagcgccaauaauugcacguuugaguauguaagccagccguuucugauggacuuggaaggaaagcaaggcaacuuuaagaaccucagggaguucguauucaaaaauauagacgguuacuucaagauuuacucaaaacauacaccuaucaacuugguccgagaucucccacaagguuuuucagcgcucgagccauugguggaccugcccaucggaaucaacauuacccgauuccagacacugcuugcacugcaccggaguuaucucacacccggcgacagcucgucugguuggacggcgggagcugccgcuuacuaugucgguuacuugcaaccucggacauuucuucugaaguauaacgaaaacgguacgaucaccgaugccguagacugcgcucucgauccccuuucagagacgaagugcacgcucaaaucauuuacuguggaaaaaggaauuuaucaaacgagcaauuucagggugcaacccacggaguccaucguacgauucccaaacauaacaaaucuuugcccguuuggcgagguuuuuaaugcuacgcgcuuugcaucaguguacgcuuggaauaggaaacgaaucucaaauuguguugcggauuauuccguguuguauaauuccgcaagcuucuccaccuuuaaauguuauggcgugucccccacaaaacuuaacgaucuuugcuuuacaaaugucuaugcggauucauucguuauccgaggggaugaagugcgacaaaucgcuccugggcagacagggaagauagcugauuacaauuacaaacuuccagacgauuuuacaggauguguaaucgcguggaacucaaacaauuuggacaguaagguugguggcaacuacaauuaucuguauagacuuuucagaaaaaguaaccucaaaccuuucgaacgcgacauuagcacugagauauaccaggccggaucaacuccuuguaacgguguugaagguuucaacuguuacuuuccgcuccaauccuacggcuuucaaccaacgaacggugucggguaccaaccauacagaguugucgucuugaguuuugagcuuuugcacgcaccugcaaccgugugugguccgaagaaaaguacuaaucugguuaaaaauaaaugcgucaauuucaacuuuaauggguugacgggcacaggcgugcugacagaguccaauaaaaaguuuuugcccuuucagcaguuugggagggacaucgccgauacgaccgaugccguccgagauccucaaacccuugaaauauuggacauuacccccuguaguuuuggcgguguaagugugauuacucccggaacgaauacaucuaaccagguagcggugcuuuaucaagaugucaacuguacagagguccccguggcgauucacgccgaucaguugacacccacauggaggguuuacagcacaggauccaacgucuuccagacgagagcaggaugcuugaucggugccgagcaugugaauaacagcuacgaaugugacauuccgauuggugcuggaaucugcgcaaguuaccaaacucaaacgaauuccccuggcuccgccuccucuguggcaucccagucuauaaucgcguauacgaugucacugggcgccgagaauucugucgcauauagcaacaacuccaucgcaauacccacaaauuuuacaauuucugugaccacggaaauucugcccgucagcaugacaaaaacuagcguggacugcacgauguauaucugcggcgacuccacagaguguuccaaccuccucuugcaauauggcagcuuuugcacacaauugaaccgagcgcucaccgggauagcggucgagcaagauaagaauacccaagagguguuugcccaggugaagcaaaucuauaagaccccuccaauaaaggauuuuggcggcuucaauuucucacaaauuuugcccgauccaucuaagccguccaagcgaucauuuauugaggaucugcuguucaacaaagucacucucgccgacgcgggguuuauuaaacaauauggcgauugccugggcgacaucgccgccagggaccuuauaugcgcccagaaguucaacggucucaccgugcugccaccauuguugacugacgaaaugaucgcacaguauacgucagcgcugcuggcugguaccauuacuucuggcuggacauucggagccggugcagcccuucagauuccauuugcaaugcagauggccuauagauuuaauggaauaggagugacgcagaacguauuguacgagaaucaaaaguugaucgcaaaccaguucaauucugccauuggaaagauacaagauucccuuucuucuaccgccucagcccuggguaaguugcaagaugucgucaaccaaaaugcacaggcuuugaauaccuugguaaaacaauugucauccaauuucggcgccauaagcucaguacuuaacgauaucuugucacgauuggauccccccgaagccgagguccaaaucgauaggcucaucacgggacggcuccagagccuucaaaccuaugugacgcaacaacugauacgggccgcagaaauccgagcguccgccaacuuggcagcuaccaagauguccgaauguguacugggucaaucaaagagaguugauuucuguggaaaaggauaccaucucaugucauucccccaaagcgccccgcacggcgucguguuccuccaugugacuuacguuccagcacaagaaaaaaacuucacaacugcgcccgcuaucugccaugacgggaaggcgcacuucccacgagaggguguauuugugucaaauggaacgcacugguucguaacgcaaaggaacuucuaugaaccgcagauaaucacgacugacaacacuuuuguaucuggcaauugugauguggucaucgggauaguuaacaacacugucuaugacccgcugcaacccgagcuugauucauuuaaagaagaacucgauaaauauuucaagaaucacaccagucccgauguggaccuuggagacauuuccgggauaaaugccucugugguaaacauccaaaaggaaaucgaucggcugaaugaaguggccaaaaacuugaacgaaagucugauagaccuucaggagcucgggaaguaugaacaauacauaaaguggccaugguacaucuggcuuggguucaucgcuggccucauagccaucguuaugguuaccaucaugcucugcuguaugacuuccuguuguuccugucucaaaggguguugcagcugugguagcugcugcaaauuugacgaggaugacucagaacccgucuugaagggagucaaguugcacuacacuuagugauaa

SEQ ID NO: 154 - RNA, 3840 nt, Artificial Sequence
  Description of Artificial Sequence: Synthetic polynucleotide
  pKL033
auguaccgaaugcagcucuuguccugcauugcucucagccuugcacuugugaccaauuccaacuugacuacccgcacacagcucccgccggcguacacuaacuccuucacccgggggguuuacuacccggacaaaguguuccgcagcaguguccugcauucaacacaagauuuguuccuuccauucuuuagcaaugucacuugguuccaugcuauacacgugaguggcacuaacggcacuaagcgcuucgauaacccgguucugccguuuaaugauggcguuuacuucgcaaguacugagaaaucaaacauuauacggggguggauauucgguacuacauuggauaguaaaacucaaagccuuuugauugucaacaaugcaacuaauguagucauaaaaguuugugaauuccaauucuguaacgaucccuuucuugguguguauuaccacaagaauaacaaaucauggauggagucugaauuucgaguauacaguagcgccaauaauugcacguuugaguauguaagccagccguuucugauggacuuggaaggaaagcaaggcaacuuuaagaaccucagggaguucguauucaaaaauauagacgguuacuucaagauuuacucaaaacauacaccuaucaacuugguccgagaucucccacaagguuuuucagcgcucgagccauugguggaccugcccaucggaaucaacauuacccgauuccagacacugcuugcacugcaccggaguuaucucacacccggcgacagcucgucugguuggacggcgggagcugccgcuuacuaugucgguuacuugcaaccucggacauuucuucugaaguauaacgaaaacgguacgaucaccgaugccguagacugcgcucucgauccccuuucagagacgaagugcacgcucaaaucauuuacuguggaaaaaggaauuuaucaaacgagcaauuucagggugcaacccacggaguccaucguacgauucccaaacauaacaaaucuuugcccguuuggcgagguuuuuaaugcuacgcgcuuugcaucaguguacgcuuggaauaggaaacgaaucucaaauuguguugcggauuauuccguguuguauaauuccgcaagcuucuccaccuuuaaauguuauggcgugucccccacaaaacuuaacgaucuuugcuuuacaaaugucuaugcggauucauucguuauccgaggggaugaagugcgacaaaucgcuccugggcagacagggaagauagcugauuacaauuacaaacuuccagacgauuuuacaggauguguaaucgcguggaacucaaacaauuuggacaguaagguugguggcaacuacaauuaucuguauagacuuuucagaaaaaguaaccucaaaccuuucgaacgcgacauuagcacugagauauaccaggccggaucaacuccuuguaacgguguugaagguuucaacuguuacuuuccgcuccaauccuacggcuuucaaccaacgaacggugucggguaccaaccauacagaguugucgucuugaguuuugagcuuuugcacgcaccugcaaccgugugugguccgaagaaaaguacuaaucugguuaaaaauaaaugcgucaauuucaacuuuaauggguugacgggcacaggcgugcugacagaguccaauaaaaaguuuuugcccuuucagcaguuugggagggacaucgccgauacgaccgaugccguccgagauccucaaacccuugaaauauuggacauuacccccuguaguuuuggcgguguaagugugauuacucccggaacgaauacaucuaaccagguagcggugcuuuaucaagaugucaacuguacagagguccccguggcgauucacgccgaucaguugacacccacauggaggguuuacagcacaggauccaacgucuuccagacgagagcaggaugcuugaucggugccgagcaugugaauaacagcuacgaaugugacauuccgauuggugcuggaaucugcgcaaguuaccaaacucaaacgaauuccccuggcuccgccuccucuguggcaucccagucuauaaucgcguauacgaugucacugggcgccgagaauucugucgcauauagcaacaacuccaucgcaauacccacaaauuuuacaauuucugugaccacggaaauucugcccgucagcaugacaaaaacuagcguggacugcacgauguauaucugcggcgacuccacagaguguuccaaccuccucuugcaauauggcagcuuuugcacacaauugaaccgagcgcucaccgggauagcggucgagcaagauaagaauacccaagagguguuugcccaggugaagcaaaucuauaagaccccuccaauaaaggauuuuggcggcuucaauuucucacaaauuuugcccgauccaucuaagccguccaagcgaucauuuauugaggaucugcuguucaacaaagucacucucgccgacgcgggguuuauuaaacaauauggcgauugccugggcgacaucgccgccagggaccuuauaugcgcccagaaguucaacggucucaccgugcugccaccauuguugacugacgaaaugaucgcacaguauacgucagcgcugcuggcugguaccauuacuucuggcuggacauucggagccggugcagcccuucagauuccauuugcaaugcagauggccuauagauuuaauggaauaggagugacgcagaacguauuguacgagaaucaaaaguugaucgcaaaccaguucaauucugccauuggaaagauacaagauucccuuucuucuaccgccucagcccuggguaaguugcaagaugucgucaaccaaaaugcacaggcuuugaauaccuugguaaaacaauugucauccaauuucggcgccauaagcucaguacuuaacgauaucuugucacgauuggauccccccgaagccgagguccaaaucgauaggcucaucacgggacggcuccagagccuucaaaccuaugugacgcaacaacugauacgggccgcagaaauccgagcguccgccaacuuggcagcuaccaagauguccgaauguguacugggucaaucaaagagaguugauuucuguggaaaaggauaccaucucaugucauucccccaaagcgccccgcacggcgucguguuccuccaugugacuuacguuccagcacaagaaaaaaacuucacaacugcgcccgcuaucugccaugacgggaaggcgcacuucccacgagaggguguauuugugucaaauggaacgcacugguucguaacgcaaaggaacuucuaugaaccgcagauaaucacgacugacaacacuuuuguaucuggcaauugugauguggucaucgggauaguuaacaacacugucuaugacccgcugcaacccgagcuugauucauuuaaagaagaacucgauaaauauuucaagaaucacaccagucccgauguggaccuuggagacauuuccgggauaaaugccucugugguaaacauccaaaaggaaaucgaucggcugaaugaaguggccaaaaacuugaacgaaagucugauagaccuucaggagcucgggaaguaugaacaauacauaaaguggccaugguacaucuggcuuggguucaucgcuggccucauagccaucguuaugguuaccaucaugcucugcuguaugacuuccuguuguuccugucucaaaggguguugcagcugugguagcugcugcaaauuugacgaggaugacucagaacccgucuugaagggagucaaguugcacuacacuuagugauaa

SEQ ID NO: 155 - RNA, 3834 nt, Artificial Sequence
  Description of Artificial Sequence: Synthetic polynucleotide
  pKL034
auguaccgaaugcagcucuuguccugcauugcucucagccuugcacuugugaccaauuccacuacccgcacacagcucccgccggcguacacuaacuccuucacccgggggguuuacuacccggacaaaguguuccgcagcaguguccugcauucaacacaagauuuguuccuuccauucuuuagcaaugucacuugguuccaugcuauacacgugaguggcacuaacggcacuaagcgcuucgauaacccgguucugccguuuaaugauggcguuuacuucgcaaguacugagaaaucaaacauuauacggggguggauauucgguacuacauuggauaguaaaacucaaagccuuuugauugucaacaaugcaacuaauguagucauaaaaguuugugaauuccaauucuguaacgaucccuuucuugguguguauuaccacaagaauaacaaaucauggauggagucugaauuucgaguauacaguagcgccaauaauugcacguuugaguauguaagccagccguuucugauggacuuggaaggaaagcaaggcaacuuuaagaaccucagggaguucguauucaaaaauauagacgguuacuucaagauuuacucaaaacauacaccuaucaacuugguccgagaucucccacaagguuuuucagcgcucgagccauugguggaccugcccaucggaaucaacauuacccgauuccagacacugcuugcacugcaccggaguuaucucacacccggcgacagcucgucugguuggacggcgggagcugccgcuuacuaugucgguuacuugcaaccucggacauuucuucugaaguauaacgaaaacgguacgaucaccgaugccguagacugcgcucucgauccccuuucagagacgaagugcacgcucaaaucauuuacuguggaaaaaggaauuuaucaaacgagcaauuucagggugcaacccacggaguccaucguacgauucccaaacauaacaaaucuuugcccguuuggcgagguuuuuaaugcuacgcgcuuugcaucaguguacgcuuggaauaggaaacgaaucucaaauuguguugcggauuauuccguguuguauaauuccgcaagcuucuccaccuuuaaauguuauggcgugucccccacaaaacuuaacgaucuuugcuuuacaaaugucuaugcggauucauucguuauccgaggggaugaagugcgacaaaucgcuccugggcagacagggaagauagcugauuacaauuacaaacuuccagacgauuuuacaggauguguaaucgcguggaacucaaacaauuuggacaguaagguugguggcaacuacaauuaucuguauagacuuuucagaaaaaguaaccucaaaccuuucgaacgcgacauuagcacugagauauaccaggccggaucaacuccuuguaacgguguugaagguuucaacuguuacuuuccgcuccaauccuacggcuuucaaccaacgaacggugucggguaccaaccauacagaguugucgucuugaguuuugagcuuuugcacgcaccugcaaccgugugugguccgaagaaaaguacuaaucugguuaaaaauaaaugcgucaauuucaacuuuaauggguugacgggcacaggcgugcugacagaguccaauaaaaaguuuuugcccuuucagcaguuugggagggacaucgccgauacgaccgaugccguccgagauccucaaacccuugaaauauuggacauuacccccuguaguuuuggcgguguaagugugauuacucccggaacgaauacaucuaaccagguagcggugcuuuaucaagaugucaacuguacagagguccccguggcgauucacgccgaucaguugacacccacauggaggguuuacagcacaggauccaacgucuuccagacgagagcaggaugcuugaucggugccgagcaugugaauaacagcuacgaaugugacauuccgauuggugcuggaaucugcgcaaguuaccaaacucaaacgaauuccccuggcuccgccuccucuguggcaucccagucuauaaucgcguauacgaugucacugggcgccgagaauucugucgcauauagcaacaacuccaucgcaauacccacaaauuuuacaauuucugugaccacggaaauucugcccgucagcaugacaaaaacuagcguggacugcacgauguauaucugcggcgacuccacagaguguuccaaccuccucuugcaauauggcagcuuuugcacacaauugaaccgagcgcucaccgggauagcggucgagcaagauaagaauacccaagagguguuugcccaggugaagcaaaucuauaagaccccuccaauaaaggauuuuggcggcuucaauuucucacaaauuuugcccgauccaucuaagccguccaagcgaucauuuauugaggaucugcuguucaacaaagucacucucgccgacgcgggguuuauuaaacaauauggcgauugccugggcgacaucgccgccagggaccuuauaugcgcccagaaguucaacggucucaccgugcugccaccauuguugacugacgaaaugaucgcacaguauacgucagcgcugcuggcugguaccauuacuucuggcuggacauucggagccggugcagcccuucagauuccauuugcaaugcagauggccuauagauuuaauggaauaggagugacgcagaacguauuguacgagaaucaaaaguugaucgcaaaccaguucaauucugccauuggaaagauacaagauucccuuucuucuaccgccucagcccuggguaaguugcaagaugucgucaaccaaaaugcacaggcuuugaauaccuugguaaaacaauugucauccaauuucggcgccauaagcucaguacuuaacgauaucuugucacgauuggauccccccgaagccgagguccaaaucgauaggcucaucacgggacggcuccagagccuucaaaccuaugugacgcaacaacugauacgggccgcagaaauccgagcguccgccaacuuggcagcuaccaagauguccgaauguguacugggucaaucaaagagaguugauuucuguggaaaaggauaccaucucaugucauucccccaaagcgccccgcacggcgucguguuccuccaugugacuuacguuccagcacaagaaaaaaacuucacaacugcgcccgcuaucugccaugacgggaaggcgcacuucccacgagaggguguauuugugucaaauggaacgcacugguucguaacgcaaaggaacuucuaugaaccgcagauaaucacgacugacaacacuuuuguaucuggcaauugugauguggucaucgggauaguuaacaacacugucuaugacccgcugcaacccgagcuugauucauuuaaagaagaacucgauaaauauuucaagaaucacaccagucccgauguggaccuuggagacauuuccgggauaaaugccucugugguaaacauccaaaaggaaaucgaucggcugaaugaaguggccaaaaacuugaacgaaagucugauagaccuucaggagcucgggaaguaugaacaauacauaaaguggccaugguacaucuggcuuggguucaucgcuggccucauagccaucguuaugguuaccaucaugcucugcuguaugacuuccuguuguuccugucucaaaggguguugcagcugugguagcugcugcaaauuugacgaggaugacucagaacccgucuugaagggagucaaguugcacuacacuuagugauaa

SEQ ID NO: 156 - RNA, 3834 nt, Artificial Sequence
  Description of Artificial Sequence: Synthetic polynucleotide
  pKL035
auggauuggacguggauacuguuccuuguggcugcagccacucgcguucacucaaacuugacuacccgcacacagcucccgccggcguacacuaacuccuucacccgggggguuuacuacccggacaaaguguuccgcagcaguguccugcauucaacacaagauuuguuccuuccauucuuuagcaaugucacuugguuccaugcuauacacgugaguggcacuaacggcacuaagcgcuucgauaacccgguucugccguuuaaugauggcguuuacuucgcaaguacugagaaaucaaacauuauacggggguggauauucgguacuacauuggauaguaaaacucaaagccuuuugauugucaacaaugcaacuaauguagucauaaaaguuugugaauuccaauucuguaacgaucccuuucuugguguguauuaccacaagaauaacaaaucauggauggagucugaauuucgaguauacaguagcgccaauaauugcacguuugaguauguaagccagccguuucugauggacuuggaaggaaagcaaggcaacuuuaagaaccucagggaguucguauucaaaaauauagacgguuacuucaagauuuacucaaaacauacaccuaucaacuugguccgagaucucccacaagguuuuucagcgcucgagccauugguggaccugcccaucggaaucaacauuacccgauuccagacacugcuugcacugcaccggaguuaucucacacccggcgacagcucgucugguuggacggcgggagcugccgcuuacuaugucgguuacuugcaaccucggacauuucuucugaaguauaacgaaaacgguacgaucaccgaugccguagacugcgcucucgauccccuuucagagacgaagugcacgcucaaaucauuuacuguggaaaaaggaauuuaucaaacgagcaauuucagggugcaacccacggaguccaucguacgauucccaaacauaacaaaucuuugcccguuuggcgagguuuuuaaugcuacgcgcuuugcaucaguguacgcuuggaauaggaaacgaaucucaaauuguguugcggauuauuccguguuguauaauuccgcaagcuucuccaccuuuaaauguuauggcgugucccccacaaaacuuaacgaucuuugcuuuacaaaugucuaugcggauucauucguuauccgaggggaugaagugcgacaaaucgcuccugggcagacagggaagauagcugauuacaauuacaaacuuccagacgauuuuacaggauguguaaucgcguggaacucaaacaauuuggacaguaagguugguggcaacuacaauuaucuguauagacuuuucagaaaaaguaaccucaaaccuuucgaacgcgacauuagcacugagauauaccaggccggaucaacuccuuguaacgguguugaagguuucaacuguuacuuuccgcuccaauccuacggcuuucaaccaacgaacggugucggguaccaaccauacagaguugucgucuugaguuuugagcuuuugcacgcaccugcaaccgugugugguccgaagaaaaguacuaaucugguuaaaaauaaaugcgucaauuucaacuuuaauggguugacgggcacaggcgugcugacagaguccaauaaaaaguuuuugcccuuucagcaguuugggagggacaucgccgauacgaccgaugccguccgagauccucaaacccuugaaauauuggacauuacccccuguaguuuuggcgguguaagugugauuacucccggaacgaauacaucuaaccagguagcggugcuuuaucaagaugucaacuguacagagguccccguggcgauucacgccgaucaguugacacccacauggaggguuuacagcacaggauccaacgucuuccagacgagagcaggaugcuugaucggugccgagcaugugaauaacagcuacgaaugugacauuccgauuggugcuggaaucugcgcaaguuaccaaacucaaacgaauuccccuggcuccgccuccucuguggcaucccagucuauaaucgcguauacgaugucacugggcgccgagaauucugucgcauauagcaacaacuccaucgcaauacccacaaauuuuacaauuucugugaccacggaaauucugcccgucagcaugacaaaaacuagcguggacugcacgauguauaucugcggcgacuccacagaguguuccaaccuccucuugcaauauggcagcuuuugcacacaauugaaccgagcgcucaccgggauagcggucgagcaagauaagaauacccaagagguguuugcccaggugaagcaaaucuauaagaccccuccaauaaaggauuuuggcggcuucaauuucucacaaauuuugcccgauccaucuaagccguccaagcgaucauuuauugaggaucugcuguucaacaaagucacucucgccgacgcgggguuuauuaaacaauauggcgauugccugggcgacaucgccgccagggaccuuauaugcgcccagaaguucaacggucucaccgugcugccaccauuguugacugacgaaaugaucgcacaguauacgucagcgcugcuggcugguaccauuacuucuggcuggacauucggagccggugcagcccuucagauuccauuugcaaugcagauggccuauagauuuaauggaauaggagugacgcagaacguauuguacgagaaucaaaaguugaucgcaaaccaguucaauucugccauuggaaagauacaagauucccuuucuucuaccgccucagcccuggguaaguugcaagaugucgucaaccaaaaugcacaggcuuugaauaccuugguaaaacaauugucauccaauuucggcgccauaagcucaguacuuaacgauaucuugucacgauuggauccccccgaagccgagguccaaaucgauaggcucaucacgggacggcuccagagccuucaaaccuaugugacgcaacaacugauacgggccgcagaaauccgagcguccgccaacuuggcagcuaccaagauguccgaauguguacugggucaaucaaagagaguugauuucuguggaaaaggauaccaucucaugucauucccccaaagcgccccgcacggcgucguguuccuccaugugacuuacguuccagcacaagaaaaaaacuucacaacugcgcccgcuaucugccaugacgggaaggcgcacuucccacgagaggguguauuugugucaaauggaacgcacugguucguaacgcaaaggaacuucuaugaaccgcagauaaucacgacugacaacacuuuuguaucuggcaauugugauguggucaucgggauaguuaacaacacugucuaugacccgcugcaacccgagcuugauucauuuaaagaagaacucgauaaauauuucaagaaucacaccagucccgauguggaccuuggagacauuuccgggauaaaugccucugugguaaacauccaaaaggaaaucgaucggcugaaugaaguggccaaaaacuugaacgaaagucugauagaccuucaggagcucgggaaguaugaacaauacauaaaguggccaugguacaucuggcuuggguucaucgcuggccucauagccaucguuaugguuaccaucaugcucugcuguaugacuuccuguuguuccugucucaaaggguguugcagcugugguagcugcugcaaauuugacgaggaugacucagaacccgucuugaagggagucaaguugcacuacacuuagugauaa

SEQ ID NO: 157 - RNA, 3828 nt, Artificial Sequence
  Description of Artificial Sequence: Synthetic polynucleotide
  pKL036
auggauuggacguggauacuguuccuuguggcugcagccacucgcguucacucaacuacccgcacacagcucccgccggcguacacuaacuccuucacccgggggguuuacuacccggacaaaguguuccgcagcaguguccugcauucaacacaagauuuguuccuuccauucuuuagcaaugucacuugguuccaugcuauacacgugaguggcacuaacggcacuaagcgcuucgauaacccgguucugccguuuaaugauggcguuuacuucgcaaguacugagaaaucaaacauuauacggggguggauauucgguacuacauuggauaguaaaacucaaagccuuuugauugucaacaaugcaacuaauguagucauaaaaguuugugaauuccaauucuguaacgaucccuuucuugguguguauuaccacaagaauaacaaaucauggauggagucugaauuucgaguauacaguagcgccaauaauugcacguuugaguauguaagccagccguuucugauggacuuggaaggaaagcaaggcaacuuuaagaaccucagggaguucguauucaaaaauauagacgguuacuucaagauuuacucaaaacauacaccuaucaacuugguccgagaucucccacaagguuuuucagcgcucgagccauugguggaccugcccaucggaaucaacauuacccgauuccagacacugcuugcacugcaccggaguuaucucacacccggcgacagcucgucugguuggacggcgggagcugccgcuuacuaugucgguuacuugcaaccucggacauuucuucugaaguauaacgaaaacgguacgaucaccgaugccguagacugcgcucucgauccccuuucagagacgaagugcacgcucaaaucauuuacuguggaaaaaggaauuuaucaaacgagcaauuucagggugcaacccacggaguccaucguacgauucccaaacauaacaaaucuuugcccguuuggcgagguuuuuaaugcuacgcgcuuugcaucaguguacgcuuggaauaggaaacgaaucucaaauuguguugcggauuauuccguguuguauaauuccgcaagcuucuccaccuuuaaauguuauggcgugucccccacaaaacuuaacgaucuuugcuuuacaaaugucuaugcggauucauucguuauccgaggggaugaagugcgacaaaucgcuccugggcagacagggaagauagcugauuacaauuacaaacuuccagacgauuuuacaggauguguaaucgcguggaacucaaacaauuuggacaguaagguugguggcaacuacaauuaucuguauagacuuuucagaaaaaguaaccucaaaccuuucgaacgcgacauuagcacugagauauaccaggccggaucaacuccuuguaacgguguugaagguuucaacuguuacuuuccgcuccaauccuacggcuuucaaccaacgaacggugucggguaccaaccauacagaguugucgucuugaguuuugagcuuuugcacgcaccugcaaccgugugugguccgaagaaaaguacuaaucugguuaaaaauaaaugcgucaauuucaacuuuaauggguugacgggcacaggcgugcugacagaguccaauaaaaaguuuuugcccuuucagcaguuugggagggacaucgccgauacgaccgaugccguccgagauccucaaacccuugaaauauuggacauuacccccuguaguuuuggcgguguaagugugauuacucccggaacgaauacaucuaaccagguagcggugcuuuaucaagaugucaacuguacagagguccccguggcgauucacgccgaucaguugacacccacauggaggguuuacagcacaggauccaacgucuuccagacgagagcaggaugcuugaucggugccgagcaugugaauaacagcuacgaaugugacauuccgauuggugcuggaaucugcgcaaguuaccaaacucaaacgaauuccccuggcuccgccuccucuguggcaucccagucuauaaucgcguauacgaugucacugggcgccgagaauucugucgcauauagcaacaacuccaucgcaauacccacaaauuuuacaauuucugugaccacggaaauucugcccgucagcaugacaaaaacuagcguggacugcacgauguauaucugcggcgacuccacagaguguuccaaccuccucuugcaauauggcagcuuuugcacacaauugaaccgagcgcucaccgggauagcggucgagcaagauaagaauacccaagagguguuugcccaggugaagcaaaucuauaagaccccuccaauaaaggauuuuggcggcuucaauuucucacaaauuuugcccgauccaucuaagccguccaagcgaucauuuauugaggaucugcuguucaacaaagucacucucgccgacgcgggguuuauuaaacaauauggcgauugccugggcgacaucgccgccagggaccuuauaugcgcccagaaguucaacggucucaccgugcugccaccauuguugacugacgaaaugaucgcacaguauacgucagcgcugcuggcugguaccauuacuucuggcuggacauucggagccggugcagcccuucagauuccauuugcaaugcagauggccuauagauuuaauggaauaggagugacgcagaacguauuguacgagaaucaaaaguugaucgcaaaccaguucaauucugccauuggaaagauacaagauucccuuucuucuaccgccucagcccuggguaaguugcaagaugucgucaaccaaaaugcacaggcuuugaauaccuugguaaaacaauugucauccaauuucggcgccauaagcucaguacuuaacgauaucuugucacgauuggauccccccgaagccgagguccaaaucgauaggcucaucacgggacggcuccagagccuucaaaccuaugugacgcaacaacugauacgggccgcagaaauccgagcguccgccaacuuggcagcuaccaagauguccgaauguguacugggucaaucaaagagaguugauuucuguggaaaaggauaccaucucaugucauucccccaaagcgccccgcacggcgucguguuccuccaugugacuuacguuccagcacaagaaaaaaacuucacaacugcgcccgcuaucugccaugacgggaaggcgcacuucccacgagaggguguauuugugucaaauggaacgcacugguucguaacgcaaaggaacuucuaugaaccgcagauaaucacgacugacaacacuuuuguaucuggcaauugugauguggucaucgggauaguuaacaacacugucuaugacccgcugcaacccgagcuugauucauuuaaagaagaacucgauaaauauuucaagaaucacaccagucccgauguggaccuuggagacauuuccgggauaaaugccucugugguaaacauccaaaaggaaaucgaucggcugaaugaaguggccaaaaacuugaacgaaagucugauagaccuucaggagcucgggaaguaugaacaauacauaaaguggccaugguacaucuggcuuggguucaucgcuggccucauagccaucguuaugguuaccaucaugcucugcuguaugacuuccuguuguuccugucucaaaggguguugcagcugugguagcugcugcaaauuugacgaggaugacucagaacccgucuugaagggagucaaguugcacuacacuuagugauaa

SEQ ID NO: 158 - RNA, 3840 nt, Artificial Sequence
  Description of Artificial Sequence: Synthetic polynucleotide
  pKL037
auggaaacuccugcggaguugcuguuccuucugcuucuuuggcucccugauacaacgggaaacuugacuacccgcacacagcucccgccggcguacacuaacuccuucacccgggggguuuacuacccggacaaaguguuccgcagcaguguccugcauucaacacaagauuuguuccuuccauucuuuagcaaugucacuugguuccaugcuauacacgugaguggcacuaacggcacuaagcgcuucgauaacccgguucugccguuuaaugauggcguuuacuucgcaaguacugagaaaucaaacauuauacggggguggauauucgguacuacauuggauaguaaaacucaaagccuuuugauugucaacaaugcaacuaauguagucauaaaaguuugugaauuccaauucuguaacgaucccuuucuugguguguauuaccacaagaauaacaaaucauggauggagucugaauuucgaguauacaguagcgccaauaauugcacguuugaguauguaagccagccguuucugauggacuuggaaggaaagcaaggcaacuuuaagaaccucagggaguucguauucaaaaauauagacgguuacuucaagauuuacucaaaacauacaccuaucaacuugguccgagaucucccacaagguuuuucagcgcucgagccauugguggaccugcccaucggaaucaacauuacccgauuccagacacugcuugcacugcaccggaguuaucucacacccggcgacagcucgucugguuggacggcgggagcugccgcuuacuaugucgguuacuugcaaccucggacauuucuucugaaguauaacgaaaacgguacgaucaccgaugccguagacugcgcucucgauccccuuucagagacgaagugcacgcucaaaucauuuacuguggaaaaaggaauuuaucaaacgagcaauuucagggugcaacccacggaguccaucguacgauucccaaacauaacaaaucuuugcccguuuggcgagguuuuuaaugcuacgcgcuuugcaucaguguacgcuuggaauaggaaacgaaucucaaauuguguugcggauuauuccguguuguauaauuccgcaagcuucuccaccuuuaaauguuauggcgugucccccacaaaacuuaacgaucuuugcuuuacaaaugucuaugcggauucauucguuauccgaggggaugaagugcgacaaaucgcuccugggcagacagggaagauagcugauuacaauuacaaacuuccagacgauuuuacaggauguguaaucgcguggaacucaaacaauuuggacaguaagguugguggcaacuacaauuaucuguauagacuuuucagaaaaaguaaccucaaaccuuucgaacgcgacauuagcacugagauauaccaggccggaucaacuccuuguaacgguguugaagguuucaacuguuacuuuccgcuccaauccuacggcuuucaaccaacgaacggugucggguaccaaccauacagaguugucgucuugaguuuugagcuuuugcacgcaccugcaaccgugugugguccgaagaaaaguacuaaucugguuaaaaauaaaugcgucaauuucaacuuuaauggguugacgggcacaggcgugcugacagaguccaauaaaaaguuuuugcccuuucagcaguuugggagggacaucgccgauacgaccgaugccguccgagauccucaaacccuugaaauauuggacauuacccccuguaguuuuggcgguguaagugugauuacucccggaacgaauacaucuaaccagguagcggugcuuuaucaagaugucaacuguacagagguccccguggcgauucacgccgaucaguugacacccacauggaggguuuacagcacaggauccaacgucuuccagacgagagcaggaugcuugaucggugccgagcaugugaauaacagcuacgaaugugacauuccgauuggugcuggaaucugcgcaaguuaccaaacucaaacgaauuccccuggcuccgccuccucuguggcaucccagucuauaaucgcguauacgaugucacugggcgccgagaauucugucgcauauagcaacaacuccaucgcaauacccacaaauuuuacaauuucugugaccacggaaauucugcccgucagcaugacaaaaacuagcguggacugcacgauguauaucugcggcgacuccacagaguguuccaaccuccucuugcaauauggcagcuuuugcacacaauugaaccgagcgcucaccgggauagcggucgagcaagauaagaauacccaagagguguuugcccaggugaagcaaaucuauaagaccccuccaauaaaggauuuuggcggcuucaauuucucacaaauuuugcccgauccaucuaagccguccaagcgaucauuuauugaggaucugcuguucaacaaagucacucucgccgacgcgggguuuauuaaacaauauggcgauugccugggcgacaucgccgccagggaccuuauaugcgcccagaaguucaacggucucaccgugcugccaccauuguugacugacgaaaugaucgcacaguauacgucagcgcugcuggcugguaccauuacuucuggcuggacauucggagccggugcagcccuucagauuccauuugcaaugcagauggccuauagauuuaauggaauaggagugacgcagaacguauuguacgagaaucaaaaguugaucgcaaaccaguucaauucugccauuggaaagauacaagauucccuuucuucuaccgccucagcccuggguaaguugcaagaugucgucaaccaaaaugcacaggcuuugaauaccuugguaaaacaauugucauccaauuucggcgccauaagcucaguacuuaacgauaucuugucacgauuggauccccccgaagccgagguccaaaucgauaggcucaucacgggacggcuccagagccuucaaaccuaugugacgcaacaacugauacgggccgcagaaauccgagcguccgccaacuuggcagcuaccaagauguccgaauguguacugggucaaucaaagagaguugauuucuguggaaaaggauaccaucucaugucauucccccaaagcgccccgcacggcgucguguuccuccaugugacuuacguuccagcacaagaaaaaaacuucacaacugcgcccgcuaucugccaugacgggaaggcgcacuucccacgagaggguguauuugugucaaauggaacgcacugguucguaacgcaaaggaacuucuaugaaccgcagauaaucacgacugacaacacuuuuguaucuggcaauugugauguggucaucgggauaguuaacaacacugucuaugacccgcugcaacccgagcuugauucauuuaaagaagaacucgauaaauauuucaagaaucacaccagucccgauguggaccuuggagacauuuccgggauaaaugccucugugguaaacauccaaaaggaaaucgaucggcugaaugaaguggccaaaaacuugaacgaaagucugauagaccuucaggagcucgggaaguaugaacaauacauaaaguggccaugguacaucuggcuuggguucaucgcuggccucauagccaucguuaugguuaccaucaugcucugcuguaugacuuccuguuguuccugucucaaaggguguugcagcugugguagcugcugcaaauuugacgaggaugacucagaacccgucuugaagggagucaaguugcacuacacuuagugauaa

SEQ ID NO: 159 - RNA, 3834 nt, Artificial Sequence
  Description of Artificial Sequence: Synthetic polynucleotide
  pKL038
auggaaacuccugcggaguugcuguuccuucugcuucuuuggcucccugauacaacgggaacuacccgcacacagcucccgccggcguacacuaacuccuucacccgggggguuuacuacccggacaaaguguuccgcagcaguguccugcauucaacacaagauuuguuccuuccauucuuuagcaaugucacuugguuccaugcuauacacgugaguggcacuaacggcacuaagcgcuucgauaacccgguucugccguuuaaugauggcguuuacuucgcaaguacugagaaaucaaacauuauacggggguggauauucgguacuacauuggauaguaaaacucaaagccuuuugauugucaacaaugcaacuaauguagucauaaaaguuugugaauuccaauucuguaacgaucccuuucuugguguguauuaccacaagaauaacaaaucauggauggagucugaauuucgaguauacaguagcgccaauaauugcacguuugaguauguaagccagccguuucugauggacuuggaaggaaagcaaggcaacuuuaagaaccucagggaguucguauucaaaaauauagacgguuacuucaagauuuacucaaaacauacaccuaucaacuugguccgagaucucccacaagguuuuucagcgcucgagccauugguggaccugcccaucggaaucaacauuacccgauuccagacacugcuugcacugcaccggaguuaucucacacccggcgacagcucgucugguuggacggcgggagcugccgcuuacuaugucgguuacuugcaaccucggacauuucuucugaaguauaacgaaaacgguacgaucaccgaugccguagacugcgcucucgauccccuuucagagacgaagugcacgcucaaaucauuuacuguggaaaaaggaauuuaucaaacgagcaauuucagggugcaacccacggaguccaucguacgauucccaaacauaacaaaucuuugcccguuuggcgagguuuuuaaugcuacgcgcuuugcaucaguguacgcuuggaauaggaaacgaaucucaaauuguguugcggauuauuccguguuguauaauuccgcaagcuucuccaccuuuaaauguuauggcgugucccccacaaaacuuaacgaucuuugcuuuacaaaugucuaugcggauucauucguuauccgaggggaugaagugcgacaaaucgcuccugggcagacagggaagauagcugauuacaauuacaaacuuccagacgauuuuacaggauguguaaucgcguggaacucaaacaauuuggacaguaagguugguggcaacuacaauuaucuguauagacuuuucagaaaaaguaaccucaaaccuuucgaacgcgacauuagcacugagauauaccaggccggaucaacuccuuguaacgguguugaagguuucaacuguuacuuuccgcuccaauccuacggcuuucaaccaacgaacggugucggguaccaaccauacagaguugucgucuugaguuuugagcuuuugcacgcaccugcaaccgugugugguccgaagaaaaguacuaaucugguuaaaaauaaaugcgucaauuucaacuuuaauggguugacgggcacaggcgugcugacagaguccaauaaaaaguuuuugcccuuucagcaguuugggagggacaucgccgauacgaccgaugccguccgagauccucaaacccuugaaauauuggacauuacccccuguaguuuuggcgguguaagugugauuacucccggaacgaauacaucuaaccagguagcggugcuuuaucaagaugucaacuguacagagguccccguggcgauucacgccgaucaguugacacccacauggaggguuuacagcacaggauccaacgucuuccagacgagagcaggaugcuugaucggugccgagcaugugaauaacagcuacgaaugugacauuccgauuggugcuggaaucugcgcaaguuaccaaacucaaacgaauuccccuggcuccgccuccucuguggcaucccagucuauaaucgcguauacgaugucacugggcgccgagaauucugucgcauauagcaacaacuccaucgcaauacccacaaauuuuacaauuucugugaccacggaaauucugcccgucagcaugacaaaaacuagcguggacugcacgauguauaucugcggcgacuccacagaguguuccaaccuccucuugcaauauggcagcuuuugcacacaauugaaccgagcgcucaccgggauagcggucgagcaagauaagaauacccaagagguguuugcccaggugaagcaaaucuauaagaccccuccaauaaaggauuuuggcggcuucaauuucucacaaauuuugcccgauccaucuaagccguccaagcgaucauuuauugaggaucugcuguucaacaaagucacucucgccgacgcgggguuuauuaaacaauauggcgauugccugggcgacaucgccgccagggaccuuauaugcgcccagaaguucaacggucucaccgugcugccaccauuguugacugacgaaaugaucgcacaguauacgucagcgcugcuggcugguaccauuacuucuggcuggacauucggagccggugcagcccuucagauuccauuugcaaugcagauggccuauagauuuaauggaauaggagugacgcagaacguauuguacgagaaucaaaaguugaucgcaaaccaguucaauucugccauuggaaagauacaagauucccuuucuucuaccgccucagcccuggguaaguugcaagaugucgucaaccaaaaugcacaggcuuugaauaccuugguaaaacaauugucauccaauuucggcgccauaagcucaguacuuaacgauaucuugucacgauuggauccccccgaagccgagguccaaaucgauaggcucaucacgggacggcuccagagccuucaaaccuaugugacgcaacaacugauacgggccgcagaaauccgagcguccgccaacuuggcagcuaccaagauguccgaauguguacugggucaaucaaagagaguugauuucuguggaaaaggauaccaucucaugucauucccccaaagcgccccgcacggcgucguguuccuccaugugacuuacguuccagcacaagaaaaaaacuucacaacugcgcccgcuaucugccaugacgggaaggcgcacuucccacgagaggguguauuugugucaaauggaacgcacugguucguaacgcaaaggaacuucuaugaaccgcagauaaucacgacugacaacacuuuuguaucuggcaauugugauguggucaucgggauaguuaacaacacugucuaugacccgcugcaacccgagcuugauucauuuaaagaagaacucgauaaauauuucaagaaucacaccagucccgauguggaccuuggagacauuuccgggauaaaugccucugugguaaacauccaaaaggaaaucgaucggcugaaugaaguggccaaaaacuugaacgaaagucugauagaccuucaggagcucgggaaguaugaacaauacauaaaguggccaugguacaucuggcuuggguucaucgcuggccucauagccaucguuaugguuaccaucaugcucugcuguaugacuuccuguuguuccugucucaaaggguguugcagcugugguagcugcugcaaauuugacgaggaugacucagaacccgucuugaagggagucaaguugcacuacacuuagugauaa

SEQ ID NO: 160 - RNA, 3843 nt, Artificial Sequence
  Description of Artificial Sequence: Synthetic polynucleotide
  pKL039
augaacgagggguccaucauguggcucgcguccuuggccguugugauugcaugugccggagcuaacuugacuacccgcacacagcucccgccggcguacacuaacuccuucacccgggggguuuacuacccggacaaaguguuccgcagcaguguccugcauucaacacaagauuuguuccuuccauucuuuagcaaugucacuugguuccaugcuauacacgugaguggcacuaacggcacuaagcgcuucgauaacccgguucugccguuuaaugauggcguuuacuucgcaaguacugagaaaucaaacauuauacggggguggauauucgguacuacauuggauaguaaaacucaaagccuuuugauugucaacaaugcaacuaauguagucauaaaaguuugugaauuccaauucuguaacgaucccuuucuugguguguauuaccacaagaauaacaaaucauggauggagucugaauuucgaguauacaguagcgccaauaauugcacguuugaguauguaagccagccguuucugauggacuuggaaggaaagcaaggcaacuuuaagaaccucagggaguucguauucaaaaauauagacgguuacuucaagauuuacucaaaacauacaccuaucaacuugguccgagaucucccacaagguuuuucagcgcucgagccauugguggaccugcccaucggaaucaacauuacccgauuccagacacugcuugcacugcaccggaguuaucucacacccggcgacagcucgucugguuggacggcgggagcugccgcuuacuaugucgguuacuugcaaccucggacauuucuucugaaguauaacgaaaacgguacgaucaccgaugccguagacugcgcucucgauccccuuucagagacgaagugcacgcucaaaucauuuacuguggaaaaaggaauuuaucaaacgagcaauuucagggugcaacccacggaguccaucguacgauucccaaacauaacaaaucuuugcccguuuggcgagguuuuuaaugcuacgcgcuuugcaucaguguacgcuuggaauaggaaacgaaucucaaauuguguugcggauuauuccguguuguauaauuccgcaagcuucuccaccuuuaaauguuauggcgugucccccacaaaacuuaacgaucuuugcuuuacaaaugucuaugcggauucauucguuauccgaggggaugaagugcgacaaaucgcuccugggcagacagggaagauagcugauuacaauuacaaacuuccagacgauuuuacaggauguguaaucgcguggaacucaaacaauuuggacaguaagguugguggcaacuacaauuaucuguauagacuuuucagaaaaaguaaccucaaaccuuucgaacgcgacauuagcacugagauauaccaggccggaucaacuccuuguaacgguguugaagguuucaacuguuacuuuccgcuccaauccuacggcuuucaaccaacgaacggugucggguaccaaccauacagaguugucgucuugaguuuugagcuuuugcacgcaccugcaaccgugugugguccgaagaaaaguacuaaucugguuaaaaauaaaugcgucaauuucaacuuuaauggguugacgggcacaggcgugcugacagaguccaauaaaaaguuuuugcccuuucagcaguuugggagggacaucgccgauacgaccgaugccguccgagauccucaaacccuugaaauauuggacauuacccccuguaguuuuggcgguguaagugugauuacucccggaacgaauacaucuaaccagguagcggugcuuuaucaagaugucaacuguacagagguccccguggcgauucacgccgaucaguugacacccacauggaggguuuacagcacaggauccaacgucuuccagacgagagcaggaugcuugaucggugccgagcaugugaauaacagcuacgaaugugacauuccgauuggugcuggaaucugcgcaaguuaccaaacucaaacgaauuccccuggcuccgccuccucuguggcaucccagucuauaaucgcguauacgaugucacugggcgccgagaauucugucgcauauagcaacaacuccaucgcaauacccacaaauuuuacaauuucugugaccacggaaauucugcccgucagcaugacaaaaacuagcguggacugcacgauguauaucugcggcgacuccacagaguguuccaaccuccucuugcaauauggcagcuuuugcacacaauugaaccgagcgcucaccgggauagcggucgagcaagauaagaauacccaagagguguuugcccaggugaagcaaaucuauaagaccccuccaauaaaggauuuuggcggcuucaauuucucacaaauuuugcccgauccaucuaagccguccaagcgaucauuuauugaggaucugcuguucaacaaagucacucucgccgacgcgggguuuauuaaacaauauggcgauugccugggcgacaucgccgccagggaccuuauaugcgcccagaaguucaacggucucaccgugcugccaccauuguugacugacgaaaugaucgcacaguauacgucagcgcugcuggcugguaccauuacuucuggcuggacauucggagccggugcagcccuucagauuccauuugcaaugcagauggccuauagauuuaauggaauaggagugacgcagaacguauuguacgagaaucaaaaguugaucgcaaaccaguucaauucugccauuggaaagauacaagauucccuuucuucuaccgccucagcccuggguaaguugcaagaugucgucaaccaaaaugcacaggcuuugaauaccuugguaaaacaauugucauccaauuucggcgccauaagcucaguacuuaacgauaucuugucacgauuggauccccccgaagccgagguccaaaucgauaggcucaucacgggacggcuccagagccuucaaaccuaugugacgcaacaacugauacgggccgcagaaauccgagcguccgccaacuuggcagcuaccaagauguccgaauguguacugggucaaucaaagagaguugauuucuguggaaaaggauaccaucucaugucauucccccaaagcgccccgcacggcgucguguuccuccaugugacuuacguuccagcacaagaaaaaaacuucacaacugcgcccgcuaucugccaugacgggaaggcgcacuucccacgagaggguguauuugugucaaauggaacgcacugguucguaacgcaaaggaacuucuaugaaccgcagauaaucacgacugacaacacuuuuguaucuggcaauugugauguggucaucgggauaguuaacaacacugucuaugacccgcugcaacccgagcuugauucauuuaaagaagaacucgauaaauauuucaagaaucacaccagucccgauguggaccuuggagacauuuccgggauaaaugccucugugguaaacauccaaaaggaaaucgaucggcugaaugaaguggccaaaaacuugaacgaaagucugauagaccuucaggagcucgggaaguaugaacaauacauaaaguggccaugguacaucuggcuuggguucaucgcuggccucauagccaucguuaugguuaccaucaugcucugcuguaugacuuccuguuguuccugucucaaaggguguugcagcugugguagcugcugcaaauuugacgaggaugacucagaacccgucuugaagggagucaaguugcacuacacuuagugauaa

SEQ ID NO: 161 - RNA, 3837 nt, Artificial Sequence
  Description of Artificial Sequence: Synthetic polynucleotide
  pKL040
augaacgagggguccaucauguggcucgcguccuuggccguugugauugcaugugccggagcuacuacccgcacacagcucccgccggcguacacuaacuccuucacccgggggguuuacuacccggacaaaguguuccgcagcaguguccugcauucaacacaagauuuguuccuuccauucuuuagcaaugucacuugguuccaugcuauacacgugaguggcacuaacggcacuaagcgcuucgauaacccgguucugccguuuaaugauggcguuuacuucgcaaguacugagaaaucaaacauuauacggggguggauauucgguacuacauuggauaguaaaacucaaagccuuuugauugucaacaaugcaacuaauguagucauaaaaguuugugaauuccaauucuguaacgaucccuuucuugguguguauuaccacaagaauaacaaaucauggauggagucugaauuucgaguauacaguagcgccaauaauugcacguuugaguauguaagccagccguuucugauggacuuggaaggaaagcaaggcaacuuuaagaaccucagggaguucguauucaaaaauauagacgguuacuucaagauuuacucaaaacauacaccuaucaacuugguccgagaucucccacaagguuuuucagcgcucgagccauugguggaccugcccaucggaaucaacauuacccgauuccagacacugcuugcacugcaccggaguuaucucacacccggcgacagcucgucugguuggacggcgggagcugccgcuuacuaugucgguuacuugcaaccucggacauuucuucugaaguauaacgaaaacgguacgaucaccgaugccguagacugcgcucucgauccccuuucagagacgaagugcacgcucaaaucauuuacuguggaaaaaggaauuuaucaaacgagcaauuucagggugcaacccacggaguccaucguacgauucccaaacauaacaaaucuuugcccguuuggcgagguuuuuaaugcuacgcgcuuugcaucaguguacgcuuggaauaggaaacgaaucucaaauuguguugcggauuauuccguguuguauaauuccgcaagcuucuccaccuuuaaauguuauggcgugucccccacaaaacuuaacgaucuuugcuuuacaaaugucuaugcggauucauucguuauccgaggggaugaagugcgacaaaucgcuccugggcagacagggaagauagcugauuacaauuacaaacuuccagacgauuuuacaggauguguaaucgcguggaacucaaacaauuuggacaguaagguugguggcaacuacaauuaucuguauagacuuuucagaaaaaguaaccucaaaccuuucgaacgcgacauuagcacugagauauaccaggccggaucaacuccuuguaacgguguugaagguuucaacuguuacuuuccgcuccaauccuacggcuuucaaccaacgaacggugucggguaccaaccauacagaguugucgucuugaguuuugagcuuuugcacgcaccugcaaccgugugugguccgaagaaaaguacuaaucugguuaaaaauaaaugcgucaauuucaacuuuaauggguugacgggcacaggcgugcugacagaguccaauaaaaaguuuuugcccuuucagcaguuugggagggacaucgccgauacgaccgaugccguccgagauccucaaacccuugaaauauuggacauuacccccuguaguuuuggcgguguaagugugauuacucccggaacgaauacaucuaaccagguagcggugcuuuaucaagaugucaacuguacagagguccccguggcgauucacgccgaucaguugacacccacauggaggguuuacagcacaggauccaacgucuuccagacgagagcaggaugcuugaucggugccgagcaugugaauaacagcuacgaaugugacauuccgauuggugcuggaaucugcgcaaguuaccaaacucaaacgaauuccccuggcuccgccuccucuguggcaucccagucuauaaucgcguauacgaugucacugggcgccgagaauucugucgcauauagcaacaacuccaucgcaauacccacaaauuuuacaauuucugugaccacggaaauucugcccgucagcaugacaaaaacuagcguggacugcacgauguauaucugcggcgacuccacagaguguuccaaccuccucuugcaauauggcagcuuuugcacacaauugaaccgagcgcucaccgggauagcggucgagcaagauaagaauacccaagagguguuugcccaggugaagcaaaucuauaagaccccuccaauaaaggauuuuggcggcuucaauuucucacaaauuuugcccgauccaucuaagccguccaagcgaucauuuauugaggaucugcuguucaacaaagucacucucgccgacgcgggguuuauuaaacaauauggcgauugccugggcgacaucgccgccagggaccuuauaugcgcccagaaguucaacggucucaccgugcugccaccauuguugacugacgaaaugaucgcacaguauacgucagcgcugcuggcugguaccauuacuucuggcuggacauucggagccggugcagcccuucagauuccauuugcaaugcagauggccuauagauuuaauggaauaggagugacgcagaacguauuguacgagaaucaaaaguugaucgcaaaccaguucaauucugccauuggaaagauacaagauucccuuucuucuaccgccucagcccuggguaaguugcaagaugucgucaaccaaaaugcacaggcuuugaauaccuugguaaaacaauugucauccaauuucggcgccauaagcucaguacuuaacgauaucuugucacgauuggauccccccgaagccgagguccaaaucgauaggcucaucacgggacggcuccagagccuucaaaccuaugugacgcaacaacugauacgggccgcagaaauccgagcguccgccaacuuggcagcuaccaagauguccgaauguguacugggucaaucaaagagaguugauuucuguggaaaaggauaccaucucaugucauucccccaaagcgccccgcacggcgucguguuccuccaugugacuuacguuccagcacaagaaaaaaacuucacaacugcgcccgcuaucugccaugacgggaaggcgcacuucccacgagaggguguauuugugucaaauggaacgcacugguucguaacgcaaaggaacuucuaugaaccgcagauaaucacgacugacaacacuuuuguaucuggcaauugugauguggucaucgggauaguuaacaacacugucuaugacccgcugcaacccgagcuugauucauuuaaagaagaacucgauaaauauuucaagaaucacaccagucccgauguggaccuuggagacauuuccgggauaaaugccucugugguaaacauccaaaaggaaaucgaucggcugaaugaaguggccaaaaacuugaacgaaagucugauagaccuucaggagcucgggaaguaugaacaauacauaaaguggccaugguacaucuggcuuggguucaucgcuggccucauagccaucguuaugguuaccaucaugcucugcuguaugacuuccuguuguuccugucucaaaggguguugcagcugugguagcugcugcaaauuugacgaggaugacucagaacccgucuugaagggagucaaguugcacuacacuuagugauaa

SEQ ID NO: 162 - RNA, 3870 nt, Artificial Sequence
  Description of Artificial Sequence: Synthetic polynucleotide
  pKL041
augggcaggaaacaaaacaaaaggggagguaaugaggguuccaucaugugguuggcuucccucgccgugguuauugcgugcgcuggugcuaacuugacuacccgcacacagcucccgccggcguacacuaacuccuucacccgggggguuuacuacccggacaaaguguuccgcagcaguguccugcauucaacacaagauuuguuccuuccauucuuuagcaaugucacuugguuccaugcuauacacgugaguggcacuaacggcacuaagcgcuucgauaacccgguucugccguuuaaugauggcguuuacuucgcaaguacugagaaaucaaacauuauacggggguggauauucgguacuacauuggauaguaaaacucaaagccuuuugauugucaacaaugcaacuaauguagucauaaaaguuugugaauuccaauucuguaacgaucccuuucuugguguguauuaccacaagaauaacaaaucauggauggagucugaauuucgaguauacaguagcgccaauaauugcacguuugaguauguaagccagccguuucugauggacuuggaaggaaagcaaggcaacuuuaagaaccucagggaguucguauucaaaaauauagacgguuacuucaagauuuacucaaaacauacaccuaucaacuugguccgagaucucccacaagguuuuucagcgcucgagccauugguggaccugcccaucggaaucaacauuacccgauuccagacacugcuugcacugcaccggaguuaucucacacccggcgacagcucgucugguuggacggcgggagcugccgcuuacuaugucgguuacuugcaaccucggacauuucuucugaaguauaacgaaaacgguacgaucaccgaugccguagacugcgcucucgauccccuuucagagacgaagugcacgcucaaaucauuuacuguggaaaaaggaauuuaucaaacgagcaauuucagggugcaacccacggaguccaucguacgauucccaaacauaacaaaucuuugcccguuuggcgagguuuuuaaugcuacgcgcuuugcaucaguguacgcuuggaauaggaaacgaaucucaaauuguguugcggauuauuccguguuguauaauuccgcaagcuucuccaccuuuaaauguuauggcgugucccccacaaaacuuaacgaucuuugcuuuacaaaugucuaugcggauucauucguuauccgaggggaugaagugcgacaaaucgcuccugggcagacagggaagauagcugauuacaauuacaaacuuccagacgauuuuacaggauguguaaucgcguggaacucaaacaauuuggacaguaagguugguggcaacuacaauuaucuguauagacuuuucagaaaaaguaaccucaaaccuuucgaacgcgacauuagcacugagauauaccaggccggaucaacuccuuguaacgguguugaagguuucaacuguuacuuuccgcuccaauccuacggcuuucaaccaacgaacggugucggguaccaaccauacagaguugucgucuugaguuuugagcuuuugcacgcaccugcaaccgugugugguccgaagaaaaguacuaaucugguuaaaaauaaaugcgucaauuucaacuuuaauggguugacgggcacaggcgugcugacagaguccaauaaaaaguuuuugcccuuucagcaguuugggagggacaucgccgauacgaccgaugccguccgagauccucaaacccuugaaauauuggacauuacccccuguaguuuuggcgguguaagugugauuacucccggaacgaauacaucuaaccagguagcggugcuuuaucaagaugucaacuguacagagguccccguggcgauucacgccgaucaguugacacccacauggaggguuuacagcacaggauccaacgucuuccagacgagagcaggaugcuugaucggugccgagcaugugaauaacagcuacgaaugugacauuccgauuggugcuggaaucugcgcaaguuaccaaacucaaacgaauuccccuggcuccgccuccucuguggcaucccagucuauaaucgcguauacgaugucacugggcgccgagaauucugucgcauauagcaacaacuccaucgcaauacccacaaauuuuacaauuucugugaccacggaaauucugcccgucagcaugacaaaaacuagcguggacugcacgauguauaucugcggcgacuccacagaguguuccaaccuccucuugcaauauggcagcuuuugcacacaauugaaccgagcgcucaccgggauagcggucgagcaagauaagaauacccaagagguguuugcccaggugaagcaaaucuauaagaccccuccaauaaaggauuuuggcggcuucaauuucucacaaauuuugcccgauccaucuaagccguccaagcgaucauuuauugaggaucugcuguucaacaaagucacucucgccgacgcgggguuuauuaaacaauauggcgauugccugggcgacaucgccgccagggaccuuauaugcgcccagaaguucaacggucucaccgugcugccaccauuguugacugacgaaaugaucgcacaguauacgucagcgcugcuggcugguaccauuacuucuggcuggacauucggagccggugcagcccuucagauuccauuugcaaugcagauggccuauagauuuaauggaauaggagugacgcagaacguauuguacgagaaucaaaaguugaucgcaaaccaguucaauucugccauuggaaagauacaagauucccuuucuucuaccgccucagcccuggguaaguugcaagaugucgucaaccaaaaugcacaggcuuugaauaccuugguaaaacaauugucauccaauuucggcgccauaagcucaguacuuaacgauaucuugucacgauuggauccccccgaagccgagguccaaaucgauaggcucaucacgggacggcuccagagccuucaaaccuaugugacgcaacaacugauacgggccgcagaaauccgagcguccgccaacuuggcagcuaccaagauguccgaauguguacugggucaaucaaagagaguugauuucuguggaaaaggauaccaucucaugucauucccccaaagcgccccgcacggcgucguguuccuccaugugacuuacguuccagcacaagaaaaaaacuucacaacugcgcccgcuaucugccaugacgggaaggcgcacuucccacgagaggguguauuugugucaaauggaacgcacugguucguaacgcaaaggaacuucuaugaaccgcagauaaucacgacugacaacacuuuuguaucuggcaauugugauguggucaucgggauaguuaacaacacugucuaugacccgcugcaacccgagcuugauucauuuaaagaagaacucgauaaauauuucaagaaucacaccagucccgauguggaccuuggagacauuuccgggauaaaugccucugugguaaacauccaaaaggaaaucgaucggcugaaugaaguggccaaaaacuugaacgaaagucugauagaccuucaggagcucgggaaguaugaacaauacauaaaguggccaugguacaucuggcuuggguucaucgcuggccucauagccaucguuaugguuaccaucaugcucugcuguaugacuuccuguuguuccugucucaaaggguguugcagcugugguagcugcugcaaauuugacgaggaugacucagaacccgucuugaagggagucaaguugcacuacacuuagugauaa

SEQ ID NO: 163 - RNA, 3864 nt, Artificial Sequence
  Description of Artificial Sequence: Synthetic polynucleotide
  pKL042
augggcaggaaacaaaacaaaaggggagguaaugaggguuccaucaugugguuggcuucccucgccgugguuauugcgugcgcuggugcuacuacccgcacacagcucccgccggcguacacuaacuccuucacccgggggguuuacuacccggacaaaguguuccgcagcaguguccugcauucaacacaagauuuguuccuuccauucuuuagcaaugucacuugguuccaugcuauacacgugaguggcacuaacggcacuaagcgcuucgauaacccgguucugccguuuaaugauggcguuuacuucgcaaguacugagaaaucaaacauuauacggggguggauauucgguacuacauuggauaguaaaacucaaagccuuuugauugucaacaaugcaacuaauguagucauaaaaguuugugaauuccaauucuguaacgaucccuuucuugguguguauuaccacaagaauaacaaaucauggauggagucugaauuucgaguauacaguagcgccaauaauugcacguuugaguauguaagccagccguuucugauggacuuggaaggaaagcaaggcaacuuuaagaaccucagggaguucguauucaaaaauauagacgguuacuucaagauuuacucaaaacauacaccuaucaacuugguccgagaucucccacaagguuuuucagcgcucgagccauugguggaccugcccaucggaaucaacauuacccgauuccagacacugcuugcacugcaccggaguuaucucacacccggcgacagcucgucugguuggacggcgggagcugccgcuuacuaugucgguuacuugcaaccucggacauuucuucugaaguauaacgaaaacgguacgaucaccgaugccguagacugcgcucucgauccccuuucagagacgaagugcacgcucaaaucauuuacuguggaaaaaggaauuuaucaaacgagcaauuucagggugcaacccacggaguccaucguacgauucccaaacauaacaaaucuuugcccguuuggcgagguuuuuaaugcuacgcgcuuugcaucaguguacgcuuggaauaggaaacgaaucucaaauuguguugcggauuauuccguguuguauaauuccgcaagcuucuccaccuuuaaauguuauggcgugucccccacaaaacuuaacgaucuuugcuuuacaaaugucuaugcggauucauucguuauccgaggggaugaagugcgacaaaucgcuccugggcagacagggaagauagcugauuacaauuacaaacuuccagacgauuuuacaggauguguaaucgcguggaacucaaacaauuuggacaguaagguugguggcaacuacaauuaucuguauagacuuuucagaaaaaguaaccucaaaccuuucgaacgcgacauuagcacugagauauaccaggccggaucaacuccuuguaacgguguugaagguuucaacuguuacuuuccgcuccaauccuacggcuuucaaccaacgaacggugucggguaccaaccauacagaguugucgucuugaguuuugagcuuuugcacgcaccugcaaccgugugugguccgaagaaaaguacuaaucugguuaaaaauaaaugcgucaauuucaacuuuaauggguugacgggcacaggcgugcugacagaguccaauaaaaaguuuuugcccuuucagcaguuugggagggacaucgccgauacgaccgaugccguccgagauccucaaacccuugaaauauuggacauuacccccuguaguuuuggcgguguaagugugauuacucccggaacgaauacaucuaaccagguagcggugcuuuaucaagaugucaacuguacagagguccccguggcgauucacgccgaucaguugacacccacauggaggguuuacagcacaggauccaacgucuuccagacgagagcaggaugcuugaucggugccgagcaugugaauaacagcuacgaaugugacauuccgauuggugcuggaaucugcgcaaguuaccaaacucaaacgaauuccccuggcuccgccuccucuguggcaucccagucuauaaucgcguauacgaugucacugggcgccgagaauucugucgcauauagcaacaacuccaucgcaauacccacaaauuuuacaauuucugugaccacggaaauucugcccgucagcaugacaaaaacuagcguggacugcacgauguauaucugcggcgacuccacagaguguuccaaccuccucuugcaauauggcagcuuuugcacacaauugaaccgagcgcucaccgggauagcggucgagcaagauaagaauacccaagagguguuugcccaggugaagcaaaucuauaagaccccuccaauaaaggauuuuggcggcuucaauuucucacaaauuuugcccgauccaucuaagccguccaagcgaucauuuauugaggaucugcuguucaacaaagucacucucgccgacgcgggguuuauuaaacaauauggcgauugccugggcgacaucgccgccagggaccuuauaugcgcccagaaguucaacggucucaccgugcugccaccauuguugacugacgaaaugaucgcacaguauacgucagcgcugcuggcugguaccauuacuucuggcuggacauucggagccggugcagcccuucagauuccauuugcaaugcagauggccuauagauuuaauggaauaggagugacgcagaacguauuguacgagaaucaaaaguugaucgcaaaccaguucaauucugccauuggaaagauacaagauucccuuucuucuaccgccucagcccuggguaaguugcaagaugucgucaaccaaaaugcacaggcuuugaauaccuugguaaaacaauugucauccaauuucggcgccauaagcucaguacuuaacgauaucuugucacgauuggauccccccgaagccgagguccaaaucgauaggcucaucacgggacggcuccagagccuucaaaccuaugugacgcaacaacugauacgggccgcagaaauccgagcguccgccaacuuggcagcuaccaagauguccgaauguguacugggucaaucaaagagaguugauuucuguggaaaaggauaccaucucaugucauucccccaaagcgccccgcacggcgucguguuccuccaugugacuuacguuccagcacaagaaaaaaacuucacaacugcgcccgcuaucugccaugacgggaaggcgcacuucccacgagaggguguauuugugucaaauggaacgcacugguucguaacgcaaaggaacuucuaugaaccgcagauaaucacgacugacaacacuuuuguaucuggcaauugugauguggucaucgggauaguuaacaacacugucuaugacccgcugcaacccgagcuugauucauuuaaagaagaacucgauaaauauuucaagaaucacaccagucccgauguggaccuuggagacauuuccgggauaaaugccucugugguaaacauccaaaaggaaaucgaucggcugaaugaaguggccaaaaacuugaacgaaagucugauagaccuucaggagcucgggaaguaugaacaauacauaaaguggccaugguacaucuggcuuggguucaucgcuggccucauagccaucguuaugguuaccaucaugcucugcuguaugacuuccuguuguuccugucucaaaggguguugcagcugugguagcugcugcaaauuugacgaggaugacucagaacccgucuugaagggagucaaguugcacuacacuuagugauaa

SEQ ID NO: 164 - RNA, 3843 nt, Artificial Sequence
  Description of Artificial Sequence: Synthetic polynucleotide
  pKL043
auggaaacugauacacuguugcuuuggguacuccuccucuggguccccggaaguacaggcgauaacuugacuacccgcacacagcucccgccggcguacacuaacuccuucacccgggggguuuacuacccggacaaaguguuccgcagcaguguccugcauucaacacaagauuuguuccuuccauucuuuagcaaugucacuugguuccaugcuauacacgugaguggcacuaacggcacuaagcgcuucgauaacccgguucugccguuuaaugauggcguuuacuucgcaaguacugagaaaucaaacauuauacggggguggauauucgguacuacauuggauaguaaaacucaaagccuuuugauugucaacaaugcaacuaauguagucauaaaaguuugugaauuccaauucuguaacgaucccuuucuugguguguauuaccacaagaauaacaaaucauggauggagucugaauuucgaguauacaguagcgccaauaauugcacguuugaguauguaagccagccguuucugauggacuuggaaggaaagcaaggcaacuuuaagaaccucagggaguucguauucaaaaauauagacgguuacuucaagauuuacucaaaacauacaccuaucaacuugguccgagaucucccacaagguuuuucagcgcucgagccauugguggaccugcccaucggaaucaacauuacccgauuccagacacugcuugcacugcaccggaguuaucucacacccggcgacagcucgucugguuggacggcgggagcugccgcuuacuaugucgguuacuugcaaccucggacauuucuucugaaguauaacgaaaacgguacgaucaccgaugccguagacugcgcucucgauccccuuucagagacgaagugcacgcucaaaucauuuacuguggaaaaaggaauuuaucaaacgagcaauuucagggugcaacccacggaguccaucguacgauucccaaacauaacaaaucuuugcccguuuggcgagguuuuuaaugcuacgcgcuuugcaucaguguacgcuuggaauaggaaacgaaucucaaauuguguugcggauuauuccguguuguauaauuccgcaagcuucuccaccuuuaaauguuauggcgugucccccacaaaacuuaacgaucuuugcuuuacaaaugucuaugcggauucauucguuauccgaggggaugaagugcgacaaaucgcuccugggcagacagggaagauagcugauuacaauuacaaacuuccagacgauuuuacaggauguguaaucgcguggaacucaaacaauuuggacaguaagguugguggcaacuacaauuaucuguauagacuuuucagaaaaaguaaccucaaaccuuucgaacgcgacauuagcacugagauauaccaggccggaucaacuccuuguaacgguguugaagguuucaacuguuacuuuccgcuccaauccuacggcuuucaaccaacgaacggugucggguaccaaccauacagaguugucgucuugaguuuugagcuuuugcacgcaccugcaaccgugugugguccgaagaaaaguacuaaucugguuaaaaauaaaugcgucaauuucaacuuuaauggguugacgggcacaggcgugcugacagaguccaauaaaaaguuuuugcccuuucagcaguuugggagggacaucgccgauacgaccgaugccguccgagauccucaaacccuugaaauauuggacauuacccccuguaguuuuggcgguguaagugugauuacucccggaacgaauacaucuaaccagguagcggugcuuuaucaagaugucaacuguacagagguccccguggcgauucacgccgaucaguugacacccacauggaggguuuacagcacaggauccaacgucuuccagacgagagcaggaugcuugaucggugccgagcaugugaauaacagcuacgaaugugacauuccgauuggugcuggaaucugcgcaaguuaccaaacucaaacgaauuccccuggcuccgccuccucuguggcaucccagucuauaaucgcguauacgaugucacugggcgccgagaauucugucgcauauagcaacaacuccaucgcaauacccacaaauuuuacaauuucugugaccacggaaauucugcccgucagcaugacaaaaacuagcguggacugcacgauguauaucugcggcgacuccacagaguguuccaaccuccucuugcaauauggcagcuuuugcacacaauugaaccgagcgcucaccgggauagcggucgagcaagauaagaauacccaagagguguuugcccaggugaagcaaaucuauaagaccccuccaauaaaggauuuuggcggcuucaauuucucacaaauuuugcccgauccaucuaagccguccaagcgaucauuuauugaggaucugcuguucaacaaagucacucucgccgacgcgggguuuauuaaacaauauggcgauugccugggcgacaucgccgccagggaccuuauaugcgcccagaaguucaacggucucaccgugcugccaccauuguugacugacgaaaugaucgcacaguauacgucagcgcugcuggcugguaccauuacuucuggcuggacauucggagccggugcagcccuucagauuccauuugcaaugcagauggccuauagauuuaauggaauaggagugacgcagaacguauuguacgagaaucaaaaguugaucgcaaaccaguucaauucugccauuggaaagauacaagauucccuuucuucuaccgccucagcccuggguaaguugcaagaugucgucaaccaaaaugcacaggcuuugaauaccuugguaaaacaauugucauccaauuucggcgccauaagcucaguacuuaacgauaucuugucacgauuggauccccccgaagccgagguccaaaucgauaggcucaucacgggacggcuccagagccuucaaaccuaugugacgcaacaacugauacgggccgcagaaauccgagcguccgccaacuuggcagcuaccaagauguccgaauguguacugggucaaucaaagagaguugauuucuguggaaaaggauaccaucucaugucauucccccaaagcgccccgcacggcgucguguuccuccaugugacuuacguuccagcacaagaaaaaaacuucacaacugcgcccgcuaucugccaugacgggaaggcgcacuucccacgagaggguguauuugugucaaauggaacgcacugguucguaacgcaaaggaacuucuaugaaccgcagauaaucacgacugacaacacuuuuguaucuggcaauugugauguggucaucgggauaguuaacaacacugucuaugacccgcugcaacccgagcuugauucauuuaaagaagaacucgauaaauauuucaagaaucacaccagucccgauguggaccuuggagacauuuccgggauaaaugccucugugguaaacauccaaaaggaaaucgaucggcugaaugaaguggccaaaaacuugaacgaaagucugauagaccuucaggagcucgggaaguaugaacaauacauaaaguggccaugguacaucuggcuuggguucaucgcuggccucauagccaucguuaugguuaccaucaugcucugcuguaugacuuccuguuguuccugucucaaaggguguugcagcugugguagcugcugcaaauuugacgaggaugacucagaacccgucuugaagggagucaaguugcacuacacuuagugauaa

SEQ ID NO: 165 - RNA, 3837 nt, Artificial Sequence
  Description of Artificial Sequence: Synthetic polynucleotide
  pKL044
auggaaacugauacacuguugcuuuggguacuccuccucuggguccccggaaguacaggcgauacuacccgcacacagcucccgccggcguacacuaacuccuucacccgggggguuuacuacccggacaaaguguuccgcagcaguguccugcauucaacacaagauuuguuccuuccauucuuuagcaaugucacuugguuccaugcuauacacgugaguggcacuaacggcacuaagcgcuucgauaacccgguucugccguuuaaugauggcguuuacuucgcaaguacugagaaaucaaacauuauacggggguggauauucgguacuacauuggauaguaaaacucaaagccuuuugauugucaacaaugcaacuaauguagucauaaaaguuugugaauuccaauucuguaacgaucccuuucuugguguguauuaccacaagaauaacaaaucauggauggagucugaauuucgaguauacaguagcgccaauaauugcacguuugaguauguaagccagccguuucugauggacuuggaaggaaagcaaggcaacuuuaagaaccucagggaguucguauucaaaaauauagacgguuacuucaagauuuacucaaaacauacaccuaucaacuugguccgagaucucccacaagguuuuucagcgcucgagccauugguggaccugcccaucggaaucaacauuacccgauuccagacacugcuugcacugcaccggaguuaucucacacccggcgacagcucgucugguuggacggcgggagcugccgcuuacuaugucgguuacuugcaaccucggacauuucuucugaaguauaacgaaaacgguacgaucaccgaugccguagacugcgcucucgauccccuuucagagacgaagugcacgcucaaaucauuuacuguggaaaaaggaauuuaucaaacgagcaauuucagggugcaacccacggaguccaucguacgauucccaaacauaacaaaucuuugcccguuuggcgagguuuuuaaugcuacgcgcuuugcaucaguguacgcuuggaauaggaaacgaaucucaaauuguguugcggauuauuccguguuguauaauuccgcaagcuucuccaccuuuaaauguuauggcgugucccccacaaaacuuaacgaucuuugcuuuacaaaugucuaugcggauucauucguuauccgaggggaugaagugcgacaaaucgcuccugggcagacagggaagauagcugauuacaauuacaaacuuccagacgauuuuacaggauguguaaucgcguggaacucaaacaauuuggacaguaagguugguggcaacuacaauuaucuguauagacuuuucagaaaaaguaaccucaaaccuuucgaacgcgacauuagcacugagauauaccaggccggaucaacuccuuguaacgguguugaagguuucaacuguuacuuuccgcuccaauccuacggcuuucaaccaacgaacggugucggguaccaaccauacagaguugucgucuugaguuuugagcuuuugcacgcaccugcaaccgugugugguccgaagaaaaguacuaaucugguuaaaaauaaaugcgucaauuucaacuuuaauggguugacgggcacaggcgugcugacagaguccaauaaaaaguuuuugcccuuucagcaguuugggagggacaucgccgauacgaccgaugccguccgagauccucaaacccuugaaauauuggacauuacccccuguaguuuuggcgguguaagugugauuacucccggaacgaauacaucuaaccagguagcggugcuuuaucaagaugucaacuguacagagguccccguggcgauucacgccgaucaguugacacccacauggaggguuuacagcacaggauccaacgucuuccagacgagagcaggaugcuugaucggugccgagcaugugaauaacagcuacgaaugugacauuccgauuggugcuggaaucugcgcaaguuaccaaacucaaacgaauuccccuggcuccgccuccucuguggcaucccagucuauaaucgcguauacgaugucacugggcgccgagaauucugucgcauauagcaacaacuccaucgcaauacccacaaauuuuacaauuucugugaccacggaaauucugcccgucagcaugacaaaaacuagcguggacugcacgauguauaucugcggcgacuccacagaguguuccaaccuccucuugcaauauggcagcuuuugcacacaauugaaccgagcgcucaccgggauagcggucgagcaagauaagaauacccaagagguguuugcccaggugaagcaaaucuauaagaccccuccaauaaaggauuuuggcggcuucaauuucucacaaauuuugcccgauccaucuaagccguccaagcgaucauuuauugaggaucugcuguucaacaaagucacucucgccgacgcgggguuuauuaaacaauauggcgauugccugggcgacaucgccgccagggaccuuauaugcgcccagaaguucaacggucucaccgugcugccaccauuguugacugacgaaaugaucgcacaguauacgucagcgcugcuggcugguaccauuacuucuggcuggacauucggagccggugcagcccuucagauuccauuugcaaugcagauggccuauagauuuaauggaauaggagugacgcagaacguauuguacgagaaucaaaaguugaucgcaaaccaguucaauucugccauuggaaagauacaagauucccuuucuucuaccgccucagcccuggguaaguugcaagaugucgucaaccaaaaugcacaggcuuugaauaccuugguaaaacaauugucauccaauuucggcgccauaagcucaguacuuaacgauaucuugucacgauuggauccccccgaagccgagguccaaaucgauaggcucaucacgggacggcuccagagccuucaaaccuaugugacgcaacaacugauacgggccgcagaaauccgagcguccgccaacuuggcagcuaccaagauguccgaauguguacugggucaaucaaagagaguugauuucuguggaaaaggauaccaucucaugucauucccccaaagcgccccgcacggcgucguguuccuccaugugacuuacguuccagcacaagaaaaaaacuucacaacugcgcccgcuaucugccaugacgggaaggcgcacuucccacgagaggguguauuugugucaaauggaacgcacugguucguaacgcaaaggaacuucuaugaaccgcagauaaucacgacugacaacacuuuuguaucuggcaauugugauguggucaucgggauaguuaacaacacugucuaugacccgcugcaacccgagcuugauucauuuaaagaagaacucgauaaauauuucaagaaucacaccagucccgauguggaccuuggagacauuuccgggauaaaugccucugugguaaacauccaaaaggaaaucgaucggcugaaugaaguggccaaaaacuugaacgaaagucugauagaccuucaggagcucgggaaguaugaacaauacauaaaguggccaugguacaucuggcuuggguucaucgcuggccucauagccaucguuaugguuaccaucaugcucugcuguaugacuuccuguuguuccugucucaaaggguguugcagcugugguagcugcugcaaauuugacgaggaugacucagaacccgucuugaagggagucaaguugcacuacacuuagugauaa

SEQ ID NO: 166 - RNA, 3843 nt, Artificial Sequence
  Description of Artificial Sequence: Synthetic polynucleotide
  pKL045
augaggccgacucugcuuuggagucuguuguugcuuuuggguguauuugcugcggcagcagccaacuugacuacccgcacacagcucccgccggcguacacuaacuccuucacccgggggguuuacuacccggacaaaguguuccgcagcaguguccugcauucaacacaagauuuguuccuuccauucuuuagcaaugucacuugguuccaugcuauacacgugaguggcacuaacggcacuaagcgcuucgauaacccgguucugccguuuaaugauggcguuuacuucgcaaguacugagaaaucaaacauuauacggggguggauauucgguacuacauuggauaguaaaacucaaagccuuuugauugucaacaaugcaacuaauguagucauaaaaguuugugaauuccaauucuguaacgaucccuuucuugguguguauuaccacaagaauaacaaaucauggauggagucugaauuucgaguauacaguagcgccaauaauugcacguuugaguauguaagccagccguuucugauggacuuggaaggaaagcaaggcaacuuuaagaaccucagggaguucguauucaaaaauauagacgguuacuucaagauuuacucaaaacauacaccuaucaacuugguccgagaucucccacaagguuuuucagcgcucgagccauugguggaccugcccaucggaaucaacauuacccgauuccagacacugcuugcacugcaccggaguuaucucacacccggcgacagcucgucugguuggacggcgggagcugccgcuuacuaugucgguuacuugcaaccucggacauuucuucugaaguauaacgaaaacgguacgaucaccgaugccguagacugcgcucucgauccccuuucagagacgaagugcacgcucaaaucauuuacuguggaaaaaggaauuuaucaaacgagcaauuucagggugcaacccacggaguccaucguacgauucccaaacauaacaaaucuuugcccguuuggcgagguuuuuaaugcuacgcgcuuugcaucaguguacgcuuggaauaggaaacgaaucucaaauuguguugcggauuauuccguguuguauaauuccgcaagcuucuccaccuuuaaauguuauggcgugucccccacaaaacuuaacgaucuuugcuuuacaaaugucuaugcggauucauucguuauccgaggggaugaagugcgacaaaucgcuccugggcagacagggaagauagcugauuacaauuacaaacuuccagacgauuuuacaggauguguaaucgcguggaacucaaacaauuuggacaguaagguugguggcaacuacaauuaucuguauagacuuuucagaaaaaguaaccucaaaccuuucgaacgcgacauuagcacugagauauaccaggccggaucaacuccuuguaacgguguugaagguuucaacuguuacuuuccgcuccaauccuacggcuuucaaccaacgaacggugucggguaccaaccauacagaguugucgucuugaguuuugagcuuuugcacgcaccugcaaccgugugugguccgaagaaaaguacuaaucugguuaaaaauaaaugcgucaauuucaacuuuaauggguugacgggcacaggcgugcugacagaguccaauaaaaaguuuuugcccuuucagcaguuugggagggacaucgccgauacgaccgaugccguccgagauccucaaacccuugaaauauuggacauuacccccuguaguuuuggcgguguaagugugauuacucccggaacgaauacaucuaaccagguagcggugcuuuaucaagaugucaacuguacagagguccccguggcgauucacgccgaucaguugacacccacauggaggguuuacagcacaggauccaacgucuuccagacgagagcaggaugcuugaucggugccgagcaugugaauaacagcuacgaaugugacauuccgauuggugcuggaaucugcgcaaguuaccaaacucaaacgaauuccccuggcuccgccuccucuguggcaucccagucuauaaucgcguauacgaugucacugggcgccgagaauucugucgcauauagcaacaacuccaucgcaauacccacaaauuuuacaauuucugugaccacggaaauucugcccgucagcaugacaaaaacuagcguggacugcacgauguauaucugcggcgacuccacagaguguuccaaccuccucuugcaauauggcagcuuuugcacacaauugaaccgagcgcucaccgggauagcggucgagcaagauaagaauacccaagagguguuugcccaggugaagcaaaucuauaagaccccuccaauaaaggauuuuggcggcuucaauuucucacaaauuuugcccgauccaucuaagccguccaagcgaucauuuauugaggaucugcuguucaacaaagucacucucgccgacgcgggguuuauuaaacaauauggcgauugccugggcgacaucgccgccagggaccuuauaugcgcccagaaguucaacggucucaccgugcugccaccauuguugacugacgaaaugaucgcacaguauacgucagcgcugcuggcugguaccauuacuucuggcuggacauucggagccggugcagcccuucagauuccauuugcaaugcagauggccuauagauuuaauggaauaggagugacgcagaacguauuguacgagaaucaaaaguugaucgcaaaccaguucaauucugccauuggaaagauacaagauucccuuucuucuaccgccucagcccuggguaaguugcaagaugucgucaaccaaaaugcacaggcuuugaauaccuugguaaaacaauugucauccaauuucggcgccauaagcucaguacuuaacgauaucuugucacgauuggauccccccgaagccgagguccaaaucgauaggcucaucacgggacggcuccagagccuucaaaccuaugugacgcaacaacugauacgggccgcagaaauccgagcguccgccaacuuggcagcuaccaagauguccgaauguguacugggucaaucaaagagaguugauuucuguggaaaaggauaccaucucaugucauucccccaaagcgccccgcacggcgucguguuccuccaugugacuuacguuccagcacaagaaaaaaacuucacaacugcgcccgcuaucugccaugacgggaaggcgcacuucccacgagaggguguauuugugucaaauggaacgcacugguucguaacgcaaaggaacuucuaugaaccgcagauaaucacgacugacaacacuuuuguaucuggcaauugugauguggucaucgggauaguuaacaacacugucuaugacccgcugcaacccgagcuugauucauuuaaagaagaacucgauaaauauuucaagaaucacaccagucccgauguggaccuuggagacauuuccgggauaaaugccucugugguaaacauccaaaaggaaaucgaucggcugaaugaaguggccaaaaacuugaacgaaagucugauagaccuucaggagcucgggaaguaugaacaauacauaaaguggccaugguacaucuggcuuggguucaucgcuggccucauagccaucguuaugguuaccaucaugcucugcuguaugacuuccuguuguuccugucucaaaggguguugcagcugugguagcugcugcaaauuugacgaggaugacucagaacccgucuugaagggagucaaguugcacuacacuuagugauaa

SEQ ID NO: 167 - RNA, 3837 nt, Artificial Sequence
  Description of Artificial Sequence: Synthetic polynucleotide
  pKL046
augaggccgacucugcuuuggagucuguuguugcuuuuggguguauuugcugcggcagcagccacuacccgcacacagcucccgccggcguacacuaacuccuucacccgggggguuuacuacccggacaaaguguuccgcagcaguguccugcauucaacacaagauuuguuccuuccauucuuuagcaaugucacuugguuccaugcuauacacgugaguggcacuaacggcacuaagcgcuucgauaacccgguucugccguuuaaugauggcguuuacuucgcaaguacugagaaaucaaacauuauacggggguggauauucgguacuacauuggauaguaaaacucaaagccuuuugauugucaacaaugcaacuaauguagucauaaaaguuugugaauuccaauucuguaacgaucccuuucuugguguguauuaccacaagaauaacaaaucauggauggagucugaauuucgaguauacaguagcgccaauaauugcacguuugaguauguaagccagccguuucugauggacuuggaaggaaagcaaggcaacuuuaagaaccucagggaguucguauucaaaaauauagacgguuacuucaagauuuacucaaaacauacaccuaucaacuugguccgagaucucccacaagguuuuucagcgcucgagccauugguggaccugcccaucggaaucaacauuacccgauuccagacacugcuugcacugcaccggaguuaucucacacccggcgacagcucgucugguuggacggcgggagcugccgcuuacuaugucgguuacuugcaaccucggacauuucuucugaaguauaacgaaaacgguacgaucaccgaugccguagacugcgcucucgauccccuuucagagacgaagugcacgcucaaaucauuuacuguggaaaaaggaauuuaucaaacgagcaauuucagggugcaacccacggaguccaucguacgauucccaaacauaacaaaucuuugcccguuuggcgagguuuuuaaugcuacgcgcuuugcaucaguguacgcuuggaauaggaaacgaaucucaaauuguguugcggauuauuccguguuguauaauuccgcaagcuucuccaccuuuaaauguuauggcgugucccccacaaaacuuaacgaucuuugcuuuacaaaugucuaugcggauucauucguuauccgaggggaugaagugcgacaaaucgcuccugggcagacagggaagauagcugauuacaauuacaaacuuccagacgauuuuacaggauguguaaucgcguggaacucaaacaauuuggacaguaagguugguggcaacuacaauuaucuguauagacuuuucagaaaaaguaaccucaaaccuuucgaacgcgacauuagcacugagauauaccaggccggaucaacuccuuguaacgguguugaagguuucaacuguuacuuuccgcuccaauccuacggcuuucaaccaacgaacggugucggguaccaaccauacagaguugucgucuugaguuuugagcuuuugcacgcaccugcaaccgugugugguccgaagaaaaguacuaaucugguuaaaaauaaaugcgucaauuucaacuuuaauggguugacgggcacaggcgugcugacagaguccaauaaaaaguuuuugcccuuucagcaguuugggagggacaucgccgauacgaccgaugccguccgagauccucaaacccuugaaauauuggacauuacccccuguaguuuuggcgguguaagugugauuacucccggaacgaauacaucuaaccagguagcggugcuuuaucaagaugucaacuguacagagguccccguggcgauucacgccgaucaguugacacccacauggaggguuuacagcacaggauccaacgucuuccagacgagagcaggaugcuugaucggugccgagcaugugaauaacagcuacgaaugugacauuccgauuggugcuggaaucugcgcaaguuaccaaacucaaacgaauuccccuggcuccgccuccucuguggcaucccagucuauaaucgcguauacgaugucacugggcgccgagaauucugucgcauauagcaacaacuccaucgcaauacccacaaauuuuacaauuucugugaccacggaaauucugcccgucagcaugacaaaaacuagcguggacugcacgauguauaucugcggcgacuccacagaguguuccaaccuccucuugcaauauggcagcuuuugcacacaauugaaccgagcgcucaccgggauagcggucgagcaagauaagaauacccaagagguguuugcccaggugaagcaaaucuauaagaccccuccaauaaaggauuuuggcggcuucaauuucucacaaauuuugcccgauccaucuaagccguccaagcgaucauuuauugaggaucugcuguucaacaaagucacucucgccgacgcgggguuuauuaaacaauauggcgauugccugggcgacaucgccgccagggaccuuauaugcgcccagaaguucaacggucucaccgugcugccaccauuguugacugacgaaaugaucgcacaguauacgucagcgcugcuggcugguaccauuacuucuggcuggacauucggagccggugcagcccuucagauuccauuugcaaugcagauggccuauagauuuaauggaauaggagugacgcagaacguauuguacgagaaucaaaaguugaucgcaaaccaguucaauucugccauuggaaagauacaagauucccuuucuucuaccgccucagcccuggguaaguugcaagaugucgucaaccaaaaugcacaggcuuugaauaccuugguaaaacaauugucauccaauuucggcgccauaagcucaguacuuaacgauaucuugucacgauuggauccccccgaagccgagguccaaaucgauaggcucaucacgggacggcuccagagccuucaaaccuaugugacgcaacaacugauacgggccgcagaaauccgagcguccgccaacuuggcagcuaccaagauguccgaauguguacugggucaaucaaagagaguugauuucuguggaaaaggauaccaucucaugucauucccccaaagcgccccgcacggcgucguguuccuccaugugacuuacguuccagcacaagaaaaaaacuucacaacugcgcccgcuaucugccaugacgggaaggcgcacuucccacgagaggguguauuugugucaaauggaacgcacugguucguaacgcaaaggaacuucuaugaaccgcagauaaucacgacugacaacacuuuuguaucuggcaauugugauguggucaucgggauaguuaacaacacugucuaugacccgcugcaacccgagcuugauucauuuaaagaagaacucgauaaauauuucaagaaucacaccagucccgauguggaccuuggagacauuuccgggauaaaugccucugugguaaacauccaaaaggaaaucgaucggcugaaugaaguggccaaaaacuugaacgaaagucugauagaccuucaggagcucgggaaguaugaacaauacauaaaguggccaugguacaucuggcuuggguucaucgcuggccucauagccaucguuaugguuaccaucaugcucugcuguaugacuuccuguuguuccugucucaaaggguguugcagcugugguagcugcugcaaauuugacgaggaugacucagaacccgucuugaagggagucaaguugcacuacacuuagugauaa

SEQ ID NO: 168 - RNA, 3837 nt, Artificial Sequence
  Description of Artificial Sequence: Synthetic polynucleotide
  pKL047
auggguguuaaaguguuguuugcuuugauuugcauugcagucgcugaagcaaaaccgaacuugacuacccgcacacagcucccgccggcguacacuaacuccuucacccgggggguuuacuacccggacaaaguguuccgcagcaguguccugcauucaacacaagauuuguuccuuccauucuuuagcaaugucacuugguuccaugcuauacacgugaguggcacuaacggcacuaagcgcuucgauaacccgguucugccguuuaaugauggcguuuacuucgcaaguacugagaaaucaaacauuauacggggguggauauucgguacuacauuggauaguaaaacucaaagccuuuugauugucaacaaugcaacuaauguagucauaaaaguuugugaauuccaauucuguaacgaucccuuucuugguguguauuaccacaagaauaacaaaucauggauggagucugaauuucgaguauacaguagcgccaauaauugcacguuugaguauguaagccagccguuucugauggacuuggaaggaaagcaaggcaacuuuaagaaccucagggaguucguauucaaaaauauagacgguuacuucaagauuuacucaaaacauacaccuaucaacuugguccgagaucucccacaagguuuuucagcgcucgagccauugguggaccugcccaucggaaucaacauuacccgauuccagacacugcuugcacugcaccggaguuaucucacacccggcgacagcucgucugguuggacggcgggagcugccgcuuacuaugucgguuacuugcaaccucggacauuucuucugaaguauaacgaaaacgguacgaucaccgaugccguagacugcgcucucgauccccuuucagagacgaagugcacgcucaaaucauuuacuguggaaaaaggaauuuaucaaacgagcaauuucagggugcaacccacggaguccaucguacgauucccaaacauaacaaaucuuugcccguuuggcgagguuuuuaaugcuacgcgcuuugcaucaguguacgcuuggaauaggaaacgaaucucaaauuguguugcggauuauuccguguuguauaauuccgcaagcuucuccaccuuuaaauguuauggcgugucccccacaaaacuuaacgaucuuugcuuuacaaaugucuaugcggauucauucguuauccgaggggaugaagugcgacaaaucgcuccugggcagacagggaagauagcugauuacaauuacaaacuuccagacgauuuuacaggauguguaaucgcguggaacucaaacaauuuggacaguaagguugguggcaacuacaauuaucuguauagacuuuucagaaaaaguaaccucaaaccuuucgaacgcgacauuagcacugagauauaccaggccggaucaacuccuuguaacgguguugaagguuucaacuguuacuuuccgcuccaauccuacggcuuucaaccaacgaacggugucggguaccaaccauacagaguugucgucuugaguuuugagcuuuugcacgcaccugcaaccgugugugguccgaagaaaaguacuaaucugguuaaaaauaaaugcgucaauuucaacuuuaauggguugacgggcacaggcgugcugacagaguccaauaaaaaguuuuugcccuuucagcaguuugggagggacaucgccgauacgaccgaugccguccgagauccucaaacccuugaaauauuggacauuacccccuguaguuuuggcgguguaagugugauuacucccggaacgaauacaucuaaccagguagcggugcuuuaucaagaugucaacuguacagagguccccguggcgauucacgccgaucaguugacacccacauggaggguuuacagcacaggauccaacgucuuccagacgagagcaggaugcuugaucggugccgagcaugugaauaacagcuacgaaugugacauuccgauuggugcuggaaucugcgcaaguuaccaaacucaaacgaauuccccuggcuccgccuccucuguggcaucccagucuauaaucgcguauacgaugucacugggcgccgagaauucugucgcauauagcaacaacuccaucgcaauacccacaaauuuuacaauuucugugaccacggaaauucugcccgucagcaugacaaaaacuagcguggacugcacgauguauaucugcggcgacuccacagaguguuccaaccuccucuugcaauauggcagcuuuugcacacaauugaaccgagcgcucaccgggauagcggucgagcaagauaagaauacccaagagguguuugcccaggugaagcaaaucuauaagaccccuccaauaaaggauuuuggcggcuucaauuucucacaaauuuugcccgauccaucuaagccguccaagcgaucauuuauugaggaucugcuguucaacaaagucacucucgccgacgcgggguuuauuaaacaauauggcgauugccugggcgacaucgccgccagggaccuuauaugcgcccagaaguucaacggucucaccgugcugccaccauuguugacugacgaaaugaucgcacaguauacgucagcgcugcuggcugguaccauuacuucuggcuggacauucggagccggugcagcccuucagauuccauuugcaaugcagauggccuauagauuuaauggaauaggagugacgcagaacguauuguacgagaaucaaaaguugaucgcaaaccaguucaauucugccauuggaaagauacaagauucccuuucuucuaccgccucagcccuggguaaguugcaagaugucgucaaccaaaaugcacaggcuuugaauaccuugguaaaacaauugucauccaauuucggcgccauaagcucaguacuuaacgauaucuugucacgauuggauccccccgaagccgagguccaaaucgauaggcucaucacgggacggcuccagagccuucaaaccuaugugacgcaacaacugauacgggccgcagaaauccgagcguccgccaacuuggcagcuaccaagauguccgaauguguacugggucaaucaaagagaguugauuucuguggaaaaggauaccaucucaugucauucccccaaagcgccccgcacggcgucguguuccuccaugugacuuacguuccagcacaagaaaaaaacuucacaacugcgcccgcuaucugccaugacgggaaggcgcacuucccacgagaggguguauuugugucaaauggaacgcacugguucguaacgcaaaggaacuucuaugaaccgcagauaaucacgacugacaacacuuuuguaucuggcaauugugauguggucaucgggauaguuaacaacacugucuaugacccgcugcaacccgagcuugauucauuuaaagaagaacucgauaaauauuucaagaaucacaccagucccgauguggaccuuggagacauuuccgggauaaaugccucugugguaaacauccaaaaggaaaucgaucggcugaaugaaguggccaaaaacuugaacgaaagucugauagaccuucaggagcucgggaaguaugaacaauacauaaaguggccaugguacaucuggcuuggguucaucgcuggccucauagccaucguuaugguuaccaucaugcucugcuguaugacuuccuguuguuccugucucaaaggguguugcagcugugguagcugcugcaaauuugacgaggaugacucagaacccgucuugaagggagucaaguugcacuacacuuagugauaa

SEQ ID NO: 169 - RNA, 3831 nt, Artificial Sequence
  Description of Artificial Sequence: Synthetic polynucleotide
  pKL048
auggguguuaaaguguuguuugcuuugauuugcauugcagucgcugaagcaaaaccgacuacccgcacacagcucccgccggcguacacuaacuccuucacccgggggguuuacuacccggacaaaguguuccgcagcaguguccugcauucaacacaagauuuguuccuuccauucuuuagcaaugucacuugguuccaugcuauacacgugaguggcacuaacggcacuaagcgcuucgauaacccgguucugccguuuaaugauggcguuuacuucgcaaguacugagaaaucaaacauuauacggggguggauauucgguacuacauuggauaguaaaacucaaagccuuuugauugucaacaaugcaacuaauguagucauaaaaguuugugaauuccaauucuguaacgaucccuuucuugguguguauuaccacaagaauaacaaaucauggauggagucugaauuucgaguauacaguagcgccaauaauugcacguuugaguauguaagccagccguuucugauggacuuggaaggaaagcaaggcaacuuuaagaaccucagggaguucguauucaaaaauauagacgguuacuucaagauuuacucaaaacauacaccuaucaacuugguccgagaucucccacaagguuuuucagcgcucgagccauugguggaccugcccaucggaaucaacauuacccgauuccagacacugcuugcacugcaccggaguuaucucacacccggcgacagcucgucugguuggacggcgggagcugccgcuuacuaugucgguuacuugcaaccucggacauuucuucugaaguauaacgaaaacgguacgaucaccgaugccguagacugcgcucucgauccccuuucagagacgaagugcacgcucaaaucauuuacuguggaaaaaggaauuuaucaaacgagcaauuucagggugcaacccacggaguccaucguacgauucccaaacauaacaaaucuuugcccguuuggcgagguuuuuaaugcuacgcgcuuugcaucaguguacgcuuggaauaggaaacgaaucucaaauuguguugcggauuauuccguguuguauaauuccgcaagcuucuccaccuuuaaauguuauggcgugucccccacaaaacuuaacgaucuuugcuuuacaaaugucuaugcggauucauucguuauccgaggggaugaagugcgacaaaucgcuccugggcagacagggaagauagcugauuacaauuacaaacuuccagacgauuuuacaggauguguaaucgcguggaacucaaacaauuuggacaguaagguugguggcaacuacaauuaucuguauagacuuuucagaaaaaguaaccucaaaccuuucgaacgcgacauuagcacugagauauaccaggccggaucaacuccuuguaacgguguugaagguuucaacuguuacuuuccgcuccaauccuacggcuuucaaccaacgaacggugucggguaccaaccauacagaguugucgucuugaguuuugagcuuuugcacgcaccugcaaccgugugugguccgaagaaaaguacuaaucugguuaaaaauaaaugcgucaauuucaacuuuaauggguugacgggcacaggcgugcugacagaguccaauaaaaaguuuuugcccuuucagcaguuugggagggacaucgccgauacgaccgaugccguccgagauccucaaacccuugaaauauuggacauuacccccuguaguuuuggcgguguaagugugauuacucccggaacgaauacaucuaaccagguagcggugcuuuaucaagaugucaacuguacagagguccccguggcgauucacgccgaucaguugacacccacauggaggguuuacagcacaggauccaacgucuuccagacgagagcaggaugcuugaucggugccgagcaugugaauaacagcuacgaaugugacauuccgauuggugcuggaaucugcgcaaguuaccaaacucaaacgaauuccccuggcuccgccuccucuguggcaucccagucuauaaucgcguauacgaugucacugggcgccgagaauucugucgcauauagcaacaacuccaucgcaauacccacaaauuuuacaauuucugugaccacggaaauucugcccgucagcaugacaaaaacuagcguggacugcacgauguauaucugcggcgacuccacagaguguuccaaccuccucuugcaauauggcagcuuuugcacacaauugaaccgagcgcucaccgggauagcggucgagcaagauaagaauacccaagagguguuugcccaggugaagcaaaucuauaagaccccuccaauaaaggauuuuggcggcuucaauuucucacaaauuuugcccgauccaucuaagccguccaagcgaucauuuauugaggaucugcuguucaacaaagucacucucgccgacgcgggguuuauuaaacaauauggcgauugccugggcgacaucgccgccagggaccuuauaugcgcccagaaguucaacggucucaccgugcugccaccauuguugacugacgaaaugaucgcacaguauacgucagcgcugcuggcugguaccauuacuucuggcuggacauucggagccggugcagcccuucagauuccauuugcaaugcagauggccuauagauuuaauggaauaggagugacgcagaacguauuguacgagaaucaaaaguugaucgcaaaccaguucaauucugccauuggaaagauacaagauucccuuucuucuaccgccucagcccuggguaaguugcaagaugucgucaaccaaaaugcacaggcuuugaauaccuugguaaaacaauugucauccaauuucggcgccauaagcucaguacuuaacgauaucuugucacgauuggauccccccgaagccgagguccaaaucgauaggcucaucacgggacggcuccagagccuucaaaccuaugugacgcaacaacugauacgggccgcagaaauccgagcguccgccaacuuggcagcuaccaagauguccgaauguguacugggucaaucaaagagaguugauuucuguggaaaaggauaccaucucaugucauucccccaaagcgccccgcacggcgucguguuccuccaugugacuuacguuccagcacaagaaaaaaacuucacaacugcgcccgcuaucugccaugacgggaaggcgcacuucccacgagaggguguauuugugucaaauggaacgcacugguucguaacgcaaaggaacuucuaugaaccgcagauaaucacgacugacaacacuuuuguaucuggcaauugugauguggucaucgggauaguuaacaacacugucuaugacccgcugcaacccgagcuugauucauuuaaagaagaacucgauaaauauuucaagaaucacaccagucccgauguggaccuuggagacauuuccgggauaaaugccucugugguaaacauccaaaaggaaaucgaucggcugaaugaaguggccaaaaacuugaacgaaagucugauagaccuucaggagcucgggaaguaugaacaauacauaaaguggccaugguacaucuggcuuggguucaucgcuggccucauagccaucguuaugguuaccaucaugcucugcuguaugacuuccuguuguuccugucucaaaggguguugcagcugugguagcugcugcaaauuugacgaggaugacucagaacccgucuugaagggagucaaguugcacuacacuuagugauaa

SEQ ID NO: 170 - DNA, 10000 bp, Artificial Sequence
  Description of Artificial Sequence: Synthetic polynucleotide
  SAM VEE TC-83 replicon
ataggcggcgcatgagagaagcccagaccaattacctacccaaaatggagaaagttcacgttgacatcgaggaagacagcccattcctcagagctttgcagcggagcttcccgcagtttgaggtagaagccaagcaggtcactgataatgaccatgctaatgccagagcgttttcgcatctggcttcaaaactgatcgaaacggaggtggacccatccgacacgatccttgacattggaagtgcgcccgcccgcagaatgtattctaagcacaagtatcattgtatctgtccgatgagatgtgcggaagatccggacagattgtataagtatgcaactaagctgaagaaaaactgtaaggaaataactgataaggaattggacaagaaaatgaaggagctcgccgccgtcatgagcgaccctgacctggaaactgagactatgtgcctccacgacgacgagtcgtgtcgctacgaagggcaagtcgctgtttaccaggatgtatacgcggttgacggaccgacaagtctctatcaccaagccaataagggagttagagtcgcctactggataggctttgacaccaccccttttatgtttaagaacttggctggagcatatccatcatactctaccaactgggccgacgaaaccgtgttaacggctcgtaacataggcctatgcagctctgacgttatggagcggtcacgtagagggatgtccattcttagaaagaagtatttgaaaccatccaacaatgttctattctctgttggctcgaccatctaccacgagaagagggacttactgaggagctggcacctgccgtctgtatttcacttacgtggcaagcaaaattacacatgtcggtgtgagactatagttagttgcgacgggtacgtcgttaaaagaatagctatcagtccaggcctgtatgggaagccttcaggctatgctgctacgatgcaccgcgagggattcttgtgctgcaaagtgacagacacattgaacggggagagggtctcttttcccgtgtgcacgtatgtgccagctacattgtgtgaccaaatgactggcatactggcaacagatgtcagtgcggacgacgcgcaaaaactgctggttgggctcaaccagcgtatagtcgtcaacggtcgcacccagagaaacaccaataccatgaaaaattaccttttgcccgtagtggcccaggcatttgctaggtgggcaaaggaatataaggaagatcaagaagatgaaaggccactaggactacgagatagacagttagtcatggggtgttgttgggcttttagaaggcacaagataacatctatttataagcgcccggatacccaaaccatcatcaaagtgaacagcgatttccactcattcgtgctgcccaggataggcagtaacacattggagatcgggctgagaacaagaatcaggaaaatgttagaggagcacaaggagccgtcacctctcattaccgccgaggacgtacaagaagctaagtgcgcagccgatgaggctaaggaggtgcgtgaagccgaggagttgcgcgcagctctaccacctttggcagctgatgttgaggagcccactctggaagccgatgtcgacttgatgttacaagaggctggggccggctcagtggagacacctcgtggcttgataaaggttaccagctacgatggcgaggacaagatcggctcttacgctgtgctttctccgcaggctgtactcaagagtgaaaaattatcttgcatccaccctctcgctgaacaagtcatagtgataacacactctggccgaaaagggcgttatgccgtggaaccataccatggtaaagtagtggtgccagagggacatgcaatacccgtccaggactttcaagctctgagtgaaagtgccaccattgtgtacaacgaacgtgagttcgtaaacaggtacctgcaccatattgccacacatggaggagcgctgaacactgatgaagaatattacaaaactgtcaagcccagcgagcacgacggcgaatacctgtacgacatcgacaggaaacagtgcgtcaagaaagaactagtcactgggctagggctcacaggcgagctggtggatcctcccttccatgaattcgcctacgagagtctgagaacacgaccagccgctccttaccaagtaccaaccataggggtgtatggcgtgccaggatcaggcaagtctggcatcattaaaagcgcagtcaccaaaaaagatctagtggtgagcgccaagaaagaaaactgtgcagaaattataagggacgtcaagaaaatgaaagggctggacgtcaatgccagaactgtggactcagtgctcttgaatggatgcaaacaccccgtagagaccctgtatattgacgaagcttttgcttgtcatgcaggtactctcagagcgctcatagccattataagacctaaaaaggcagtgctctgcggggatcccaaacagtgcggtttttttaacatgatgtgcctgaaagtgcattttaaccacgagatttgcacacaagtcttccacaaaagcatctctcgccgttgcactaaatctgtgacttcggtcgtctcaaccttgttttacgacaaaaaaatgagaacgacgaatccgaaagagactaagattgtgattgacactaccggcagtaccaaacctaagcaggacgatctcattctcacttgtttcagagggtgggtgaagcagttgcaaatagattacaaaggcaacgaaataatgacggcagctgcctctcaagggctgacccgtaaaggtgtgtatgccgttcggtacaaggtgaatgaaaatcctctgtacgcacccacctcagaacatgtgaacgtcctactgacccgcacggaggaccgcatcgtgtggaaaacactagccggcgacccatggataaaaacactgactgccaagtaccctgggaatttcactgccacgatagaggagtggcaagcagagcatgatgccatcatgaggcacatcttggagagaccggaccctaccgacgtcttccagaataaggcaaacgtgtgttgggccaaggctttagtgccggtgctgaagaccgctggcatagacatgaccactgaacaatggaacactgtggattattttgaaacggacaaagctcactcagcagagatagtattgaaccaactatgcgtgaggttctttggactcgatctggactccggtctattttctgcacccactgttccgttatccattaggaataatcactgggataactccccgtcgcctaacatgtacgggctgaataaagaagtggtccgtcagctctctcgcaggtacccacaactgcctcgggcagttgccactggaagagtctatgacatgaacactggtacactgcgcaattatgatccgcgcataaacctagtacctgtaaacagaagactgcctcatgctttagtcctccaccataatgaacacccacagagtgacttttcttcattcgtcagcaaattgaagggcagaactgtcctggtggtcggggaaaagttgtccgtcccaggcaaaatggttgactggttgtcagaccggcctgaggctaccttcagagctcggctggatttaggcatcccaggtgatgtgcccaaatatgacataatatttgttaatgtgaggaccccatataaataccatcactatcagcagtgtgaagaccatgccattaagcttagcatgttgaccaagaaagcttgtctgcatctgaatcccggcggaacctgtgtcagcataggttatggttacgctgacagggccagcgaaagcatcattggtgctatagcgcggcagttcaagttttcccgggtatgcaaaccgaaatcctcacttgaagagacggaagttctgtttgtattcattgggtacgatcgcaaggcccgtacgcacaatccttacaagctttcatcaaccttgaccaacatttatacaggttccagactccacgaagccggatgtgcaccctcatatcatgtggtgcgaggggatattgccacggccaccgaaggagtgattataaatgctgctaacagcaaaggacaacctggcggaggggtgtgcggagcgctgtataagaaattcccggaaagcttcgatttacagccgatcgaagtaggaaaagcgcgactggtcaaaggtgcagctaaacatatcattcatgccgtaggaccaaacttcaacaaagtttcggaggttgaaggtgacaaacagttggcagaggcttatgagtccatcgctaagattgtcaacgataacaattacaagtcagtagcgattccactgttgtccaccggcatcttttccgggaacaaagatcgactaacccaatcattgaaccatttgctgacagctttagacaccactgatgcagatgtagccatatactgcagggacaagaaatgggaaatgactctcaaggaagcagtggctaggagagaagcagtggaggagatatgcatatccgacgactcttcagtgacagaacctgatgcagagctggtgagggtgcatccgaagagttctttggctggaaggaagggctacagcacaagcgatggcaaaactttctcatatttggaagggaccaagtttcaccaggcggccaaggatatagcagaaattaatgccatgtggcccgttgcaacggaggccaatgagcaggtatgcatgtatatcctcggagaaagcatgagcagtattaggtcgaaatgccccgtcgaagagtcggaagcctccacaccacctagcacgctgccttgcttgtgcatccatgccatgactccagaaagagtacagcgcctaaaagcctcacgtccagaacaaattactgtgtgctcatcctttccattgccgaagtatagaatcactggtgtgcagaagatccaatgctcccagcctatattgttctcaccgaaagtgcctgcgtatattcatccaaggaagtatctcgtggaaacaccaccggtagacgagactccggagccatcggcagagaaccaatccacagaggggacacctgaacaaccaccacttataaccgaggatgagaccaggactagaacgcctgagccgatcatcatcgaagaggaagaagaggatagcataagtttgctgtcagatggcccgacccaccaggtgctgcaagtcgaggcagacattcacgggccgccctctgtatctagctcatcctggtccattcctcatgcatccgactttgatgtggacagtttatccatacttgacaccctggagggagctagcgtgaccagcggggcaacgtcagccgagactaactcttacttcgcaaagagtatggagtttctggcgcgaccggtgcctgcgcctcgaacagtattcaggaaccctccacatcccgctccgcgcacaagaacaccgtcacttgcacccagcagggcctgctcgagaaccagcctagtttccaccccgccaggcgtgaatagggtgatcactagagaggagctcgaggcgcttaccccgtcacgcactcctagcaggtcggtctcgagaaccagcctggtctccaacccgccaggcgtaaatagggtgattacaagagaggagtttgaggcgttcgtagcacaacaacaatgacggtttgatgcgggtgcatacatcttttcctccgacaccggtcaagggcatttacaacaaaaatcagtaaggcaaacggtgctatccgaagtggtgttggagaggaccgaattggagatttcgtatgccccgcgcctcgaccaagaaaaagaagaattactacgcaagaaattacagttaaatcccacacctgctaacagaagcagataccagtccaggaaggtggagaacatgaaagccataacagctagacgtattctgcaaggcctagggcattatttgaaggcagaaggaaaagtggagtgctaccgaaccctgcatcctgttcctttgtattcatctagtgtgaaccgtgccttttcaagccccaaggtcgcagtggaagcctgtaacgccatgttgaaagagaactttccgactgtggcttcttactgtattattccagagtacgatgcctatttggacatggttgacggagcttcatgctgcttagacactgccagtttttgccctgcaaagctgcgcagctttccaaagaaacactcctatttggaacccacaatacgatcggcagtgccttcagcgatccagaacacgctccagaacgtcctggcagctgccacaaaaagaaattgcaatgtcacgcaaatgagagaattgcccgtattggattcggcggcctttaatgtggaatgcttcaagaaatatgcgtgtaataatgaatattgggaaacgtttaaagaaaaccccatcaggcttactgaagaaaacgtggtaaattacattaccaaattaaaaggaccaaaagctgctgctctttttgcgaagacacataatttgaatatgttgcaggacataccaatggacaggtttgtaatggacttaaagagagacgtgaaagtgactccaggaacaaaacatactgaagaacggcccaaggtacaggtgatccaggctgccgatccgctagcaacagcgtatctgtgcggaatccaccgagagctggttaggagattaaatgcggtcctgcttccgaacattcatacactgtttgatatgtcggctgaagactttgacgctattatagccgagcacttccagcctggggattgtgttctggaaactgacatcgcgtcgtttgataaaagtgaggacgacgccatggctctgaccgcgttaatgattctggaagacttaggtgtggacgcagagctgttgacgctgattgaggcggctttcggcgaaatttcatcaatacatttgcccactaaaactaaatttaaattcggagccatgatgaaatctggaatgttcctcacactgtttgtgaacacagtcattaacattgtaatcgcaagcagagtgttgagagaacggctaaccggatcaccatgtgcagcattcattggagatgacaatatcgtgaaaggagtcaaatcggacaaattaatggcagacaggtgcgccacctggttgaatatggaagtcaagattatagatgctgtggtgggcgagaaagcgccttatttctgtggagggtttattttgtgtgactccgtgaccggcacagcgtgccgtgtggcagaccccctaaaaaggctgtttaagcttggcaaacctctggcagcagacgatgaacatgatgatgacaggagaagggcattgcatgaagagtcaacacgctggaaccgagtgggtattctttcagagctgtgcaaggcagtagaatcaaggtatgaaaccgtaggaacttccatcatagttatggccatgactactctagctagcagtgttaaatcattcagctacctgagaggggcccctataactctctacggctaacctgaatggactacgacatagtctagtccgccaagtctagacggcgcgcccacccagcggccgcatacagcagcaattggcaagctgcttacatagaactcgcggcgattggcatgccgccttaaaatttttattttatttttcttttcttttccgaatcggattttgtttttaatatttcaaaaaaaaaaaaaaaaaaaaaaaaaaaaaaaaaaaaaaaagaagagcgtttaaacacgtgatatctggcctcatgggccttcctttcactgcccgctttccagtcgggaaacctgtcgtgccagctgcattaacatggtcatagctgtttccttgcgtattgggcgctctccgcttcctcgctcactgactcgctgcgctcggtcgttcgggtaaagcctggggtgcctaatgagcaaaaggccagcaaaaggccaggaaccgtaaaaaggccgcgttgctggcgtttttccataggctccgcccccctgacgagcatcacaaaaatcgacgctcaagtcagaggtggcgaaacccgacaggactataaagataccaggcgtttccccctggaagctccctcgtgcgctctcctgttccgaccctgccgcttaccggatacctgtccgcctttctcccttcgggaagcgtggcgctttctcatagctcacgctgtaggtatctcagttcggtgtaggtcgttcgctccaagctgggctgtgtgcacgaaccccccgttcagcccgaccgctgcgccttatccggtaactatcgtcttgagtccaacccggtaagacacgacttatcgccactggcagcagccactggtaacaggattagcagagcgaggtatgtaggcggtgctacagagttcttgaagtggtggcctaactacggctacactagaagaacagtatttggtatctgcgctctgctgaagccagttaccttcggaaaaagagttggtagctcttgatccggcaaacaaaccaccgctggtagcggtggtttttttgtttgcaagcagcagattacgcgcagaaaaaaaggatctcaagaagatcctttgatcttttctacggggtctgacgctcagtggaacgaaaactcacgttaagggattttggtcatgaatacacggtgcctgactgcgttagcaatttaactgtgataaactaccgcattaaagcttatcgatgataagctgtcaaacatgagaattcttagaaaaactcatcgagcatcaaatgaaactgcaatttattcatatcaggattatcaataccatatttttgaaaaagccgtttctgtaatgaaggagaaaactcaccgaggcagttccataggatggcaagatcctggtatcggtctgcgattccgactcgtccaacatcaatacaacctattaatttcccctcgtcaaaaataaggttatcaagtgagaaatcaccatgagtgacgactgaatccggtgagaatggcaaaagcttatgcatttctttccagacttgttcaacaggccagccattacgctcgtcatcaaaatcactcgcatcaaccaaaccgttattcattcgtgattgcgcctgagcgagacgaaatacgcgatcgctgttaaaaggacaattacaaacaggaatcgaatgcaaccggcgcaggaacactgccagcgcatcaacaatattttcacctgaatcaggatattcttctaatacctggaatgctgttttcccggggatcgcagtggtgagtaaccatgcatcatcaggagtacggataaaatgcttgatggtcggaagaggcataaattccgtcagccagtttagtctgaccatctcatctgtaacatcattggcaacgctacctttgccatgtttcagaaacaactctggcgcatcgggcttcccatacaatcgatagattgtcgcacctgattgcccgacattatcgcgagcccatttatacccatataaatcagcatccatgttggaatttaatcgcggcctcgagcaagacgtttcccgttgaatatggctcataacaccccttgtattactgtttatgtaagcagacagttttattgttcatgagcggatacatatttgaatgtatttagaaaaataaacaaataggggttccgcgcacatttccccgaaaagtgccacctaaattgtaagcgttaatattttgttaaaattcgcgttaaatttttgttaaatcagctcattttttaaccaataggccgaaatcggcaaaatcccttataaatcaaaagaatagaccgagatagggttgagtggccgctacagggcgctcccattcgccattcaggctgcgcaactgttgggaagggcgtttcggtgcgggcctcttcgctattacgccagctggcgaaagggggatgtgctgcaaggcgattaagttgggtaacgccagggttttcccagtcacacgcgtaatacgactcactatag

SEQ ID NO: 171 - RNA, 7747 nt, Artificial Sequence
  Description of Artificial Sequence: Synthetic polynucleotide
  SAM VEE TC-83 replicon
auaggcggcgcaugagagaagcccagaccaauuaccuacccaaaauggagaaaguucacguugacaucgaggaagacagcccauuccucagagcuuugcagcggagcuucccgcaguuugagguagaagccaagcaggucacugauaaugaccaugcuaaugccagagcguuuucgcaucuggcuucaaaacugaucgaaacggagguggacccauccgacacgauccuugacauuggaagugcgcccgcccgcagaauguauucuaagcacaaguaucauuguaucuguccgaugagaugugcggaagauccggacagauuguauaaguaugcaacuaagcugaagaaaaacuguaaggaaauaacugauaaggaauuggacaagaaaaugaaggagcucgccgccgucaugagcgacccugaccuggaaacugagacuaugugccuccacgacgacgagucgugucgcuacgaagggcaagucgcuguuuaccaggauguauacgcgguugacggaccgacaagucucuaucaccaagccaauaagggaguuagagucgccuacuggauaggcuuugacaccaccccuuuuauguuuaagaacuuggcuggagcauauccaucauacucuaccaacugggccgacgaaaccguguuaacggcucguaacauaggccuaugcagcucugacguuauggagcggucacguagagggauguccauucuuagaaagaaguauuugaaaccauccaacaauguucuauucucuguuggcucgaccaucuaccacgagaagagggacuuacugaggagcuggcaccugccgucuguauuucacuuacguggcaagcaaaauuacacaugucggugugagacuauaguuaguugcgacggguacgucguuaaaagaauagcuaucaguccaggccuguaugggaagccuucaggcuaugcugcuacgaugcaccgcgagggauucuugugcugcaaagugacagacacauugaacggggagagggucucuuuucccgugugcacguaugugccagcuacauugugugaccaaaugacuggcauacuggcaacagaugucagugcggacgacgcgcaaaaacugcugguugggcucaaccagcguauagucgucaacggucgcacccagagaaacaccaauaccaugaaaaauuaccuuuugcccguaguggcccaggcauuugcuaggugggcaaaggaauauaaggaagaucaagaagaugaaaggccacuaggacuacgagauagacaguuagucaugggguguuguugggcuuuuagaaggcacaagauaacaucuauuuauaagcgcccggauacccaaaccaucaucaaagugaacagcgauuuccacucauucgugcugcccaggauaggcaguaacacauuggagaucgggcugagaacaagaaucaggaaaauguuagaggagcacaaggagccgucaccucucauuaccgccgaggacguacaagaagcuaagugcgcagccgaugaggcuaaggaggugcgugaagccgaggaguugcgcgcagcucuaccaccuuuggcagcugauguugaggagcccacucuggaagccgaugucgacuugauguuacaagaggcuggggccggcucaguggagacaccucguggcuugauaaagguuaccagcuacgauggcgaggacaagaucggcucuuacgcugugcuuucuccgcaggcuguacucaagagugaaaaauuaucuugcauccacccucucgcugaacaagucauagugauaacacacucuggccgaaaagggcguuaugccguggaaccauaccaugguaaaguaguggugccagagggacaugcaauacccguccaggacuuucaagcucugagugaaagugccaccauuguguacaacgaacgugaguucguaaacagguaccugcaccauauugccacacauggaggagcgcugaacacugaugaagaauauuacaaaacugucaagcccagcgagcacgacggcgaauaccuguacgacaucgacaggaaacagugcgucaagaaagaacuagucacugggcuagggcucacaggcgagcugguggauccucccuuccaugaauucgccuacgagagucugagaacacgaccagccgcuccuuaccaaguaccaaccauagggguguauggcgugccaggaucaggcaagucuggcaucauuaaaagcgcagucaccaaaaaagaucuaguggugagcgccaagaaagaaaacugugcagaaauuauaagggacgucaagaaaaugaaagggcuggacgucaaugccagaacuguggacucagugcucuugaauggaugcaaacaccccguagagacccuguauauugacgaagcuuuugcuugucaugcagguacucucagagcgcucauagccauuauaagaccuaaaaaggcagugcucugcggggaucccaaacagugcgguuuuuuuaacaugaugugccugaaagugcauuuuaaccacgagauuugcacacaagucuuccacaaaagcaucucucgccguugcacuaaaucugugacuucggucgucucaaccuuguuuuacgacaaaaaaaugagaacgacgaauccgaaagagacuaagauugugauugacacuaccggcaguaccaaaccuaagcaggacgaucucauucucacuuguuucagagggugggugaagcaguugcaaauagauuacaaaggcaacgaaauaaugacggcagcugccucucaagggcugacccguaaagguguguaugccguucgguacaaggugaaugaaaauccucuguacgcacccaccucagaacaugugaacguccuacugacccgcacggaggaccgcaucguguggaaaacacuagccggcgacccauggauaaaaacacugacugccaaguacccugggaauuucacugccacgauagaggaguggcaagcagagcaugaugccaucaugaggcacaucuuggagagaccggacccuaccgacgucuuccagaauaaggcaaacguguguugggccaaggcuuuagugccggugcugaagaccgcuggcauagacaugaccacugaacaauggaacacuguggauuauuuugaaacggacaaagcucacucagcagagauaguauugaaccaacuaugcgugagguucuuuggacucgaucuggacuccggucuauuuucugcacccacuguuccguuauccauuaggaauaaucacugggauaacuccccgucgccuaacauguacgggcugaauaaagaagugguccgucagcucucucgcagguacccacaacugccucgggcaguugccacuggaagagucuaugacaugaacacugguacacugcgcaauuaugauccgcgcauaaaccuaguaccuguaaacagaagacugccucaugcuuuaguccuccaccauaaugaacacccacagagugacuuuucuucauucgucagcaaauugaagggcagaacuguccugguggucggggaaaaguuguccgucccaggcaaaaugguugacugguugucagaccggccugaggcuaccuucagagcucggcuggauuuaggcaucccaggugaugugcccaaauaugacauaauauuuguuaaugugaggaccccauauaaauaccaucacuaucagcagugugaagaccaugccauuaagcuuagcauguugaccaagaaagcuugucugcaucugaaucccggcggaaccugugucagcauagguuaugguuacgcugacagggccagcgaaagcaucauuggugcuauagcgcggcaguucaaguuuucccggguaugcaaaccgaaauccucacuugaagagacggaaguucuguuuguauucauuggguacgaucgcaaggcccguacgcacaauccuuacaagcuuucaucaaccuugaccaacauuuauacagguuccagacuccacgaagccggaugugcacccucauaucauguggugcgaggggauauugccacggccaccgaaggagugauuauaaaugcugcuaacagcaaaggacaaccuggcggaggggugugcggagcgcuguauaagaaauucccggaaagcuucgauuuacagccgaucgaaguaggaaaagcgcgacuggucaaaggugcagcuaaacauaucauucaugccguaggaccaaacuucaacaaaguuucggagguugaaggugacaaacaguuggcagaggcuuaugaguccaucgcuaagauugucaacgauaacaauuacaagucaguagcgauuccacuguuguccaccggcaucuuuuccgggaacaaagaucgacuaacccaaucauugaaccauuugcugacagcuuuagacaccacugaugcagauguagccauauacugcagggacaagaaaugggaaaugacucucaaggaagcaguggcuaggagagaagcaguggaggagauaugcauauccgacgacucuucagugacagaaccugaugcagagcuggugagggugcauccgaagaguucuuuggcuggaaggaagggcuacagcacaagcgauggcaaaacuuucucauauuuggaagggaccaaguuucaccaggcggccaaggauauagcagaaauuaaugccauguggcccguugcaacggaggccaaugagcagguaugcauguauauccucggagaaagcaugagcaguauuaggucgaaaugccccgucgaagagucggaagccuccacaccaccuagcacgcugccuugcuugugcauccaugccaugacuccagaaagaguacagcgccuaaaagccucacguccagaacaaauuacugugugcucauccuuuccauugccgaaguauagaaucacuggugugcagaagauccaaugcucccagccuauauuguucucaccgaaagugccugcguauauucauccaaggaaguaucucguggaaacaccaccgguagacgagacuccggagccaucggcagagaaccaauccacagaggggacaccugaacaaccaccacuuauaaccgaggaugagaccaggacuagaacgccugagccgaucaucaucgaagaggaagaagaggauagcauaaguuugcugucagauggcccgacccaccaggugcugcaagucgaggcagacauucacgggccgcccucuguaucuagcucauccugguccauuccucaugcauccgacuuugauguggacaguuuauccauacuugacacccuggagggagcuagcgugaccagcggggcaacgucagccgagacuaacucuuacuucgcaaagaguauggaguuucuggcgcgaccggugccugcgccucgaacaguauucaggaacccuccacaucccgcuccgcgcacaagaacaccgucacuugcacccagcagggccugcucgagaaccagccuaguuuccaccccgccaggcgugaauagggugaucacuagagaggagcucgaggcgcuuaccccgucacgcacuccuagcaggucggucucgagaaccagccuggucuccaacccgccaggcguaaauagggugauuacaagagaggaguuugaggcguucguagcacaacaacaaugacgguuugaugcgggugcauacaucuuuuccuccgacaccggucaagggcauuuacaacaaaaaucaguaaggcaaacggugcuauccgaagugguguuggagaggaccgaauuggagauuucguaugccccgcgccucgaccaagaaaaagaagaauuacuacgcaagaaauuacaguuaaaucccacaccugcuaacagaagcagauaccaguccaggaagguggagaacaugaaagccauaacagcuagacguauucugcaaggccuagggcauuauuugaaggcagaaggaaaaguggagugcuaccgaacccugcauccuguuccuuuguauucaucuagugugaaccgugccuuuucaagccccaaggucgcaguggaagccuguaacgccauguugaaagagaacuuuccgacuguggcuucuuacuguauuauuccagaguacgaugccuauuuggacaugguugacggagcuucaugcugcuuagacacugccaguuuuugcccugcaaagcugcgcagcuuuccaaagaaacacuccuauuuggaacccacaauacgaucggcagugccuucagcgauccagaacacgcuccagaacguccuggcagcugccacaaaaagaaauugcaaugucacgcaaaugagagaauugcccguauuggauucggcggccuuuaauguggaaugcuucaagaaauaugcguguaauaaugaauauugggaaacguuuaaagaaaaccccaucaggcuuacugaagaaaacgugguaaauuacauuaccaaauuaaaaggaccaaaagcugcugcucuuuuugcgaagacacauaauuugaauauguugcaggacauaccaauggacagguuuguaauggacuuaaagagagacgugaaagugacuccaggaacaaaacauacugaagaacggcccaagguacaggugauccaggcugccgauccgcuagcaacagcguaucugugcggaauccaccgagagcugguuaggagauuaaaugcgguccugcuuccgaacauucauacacuguuugauaugucggcugaagacuuugacgcuauuauagccgagcacuuccagccuggggauuguguucuggaaacugacaucgcgucguuugauaaaagugaggacgacgccauggcucugaccgcguuaaugauucuggaagacuuagguguggacgcagagcuguugacgcugauugaggcggcuuucggcgaaauuucaucaauacauuugcccacuaaaacuaaauuuaaauucggagccaugaugaaaucuggaauguuccucacacuguuugugaacacagucauuaacauuguaaucgcaagcagaguguugagagaacggcuaaccggaucaccaugugcagcauucauuggagaugacaauaucgugaaaggagucaaaucggacaaauuaauggcagacaggugcgccaccugguugaauauggaagucaagauuauagaugcuguggugggcgagaaagcgccuuauuucuguggaggguuuauuuugugugacuccgugaccggcacagcgugccguguggcagacccccuaaaaaggcuguuuaagcuuggcaaaccucuggcagcagacgaugaacaugaugaugacaggagaagggcauugcaugaagagucaacacgcuggaaccgaguggguauucuuucagagcugugcaaggcaguagaaucaagguaugaaaccguaggaacuuccaucauaguuauggccaugacuacucuagcuagcaguguuaaaucauucagcuaccugagaggggccccuauaacucucuacggcuaaccugaauggacuacgacauagucuaguccgccaagucuagacggcgcgcccacccagcggccgcauacagcagcaauuggcaagcugcuuacauagaacucgcggcgauuggcaugccgccuuaaaauuuuuauuuuauuuuucuuuucuuuuccgaaucggauuuuguuuuuaauauuucaaaaaaaaaaaaaaaaaaaaaaaaaaaaaaaaaaaaaaaa

SEQ ID NO: 172 - RNA, 7561 nt, Artificial Sequence
  Description of Artificial Sequence: Synthetic polynucleotide
  SAM VEE TC-83 replicon 1-7561
auaggcggcgcaugagagaagcccagaccaauuaccuacccaaaauggagaaaguucacguugacaucgaggaagacagcccauuccucagagcuuugcagcggagcuucccgcaguuugagguagaagccaagcaggucacugauaaugaccaugcuaaugccagagcguuuucgcaucuggcuucaaaacugaucgaaacggagguggacccauccgacacgauccuugacauuggaagugcgcccgcccgcagaauguauucuaagcacaaguaucauuguaucuguccgaugagaugugcggaagauccggacagauuguauaaguaugcaacuaagcugaagaaaaacuguaaggaaauaacugauaaggaauuggacaagaaaaugaaggagcucgccgccgucaugagcgacccugaccuggaaacugagacuaugugccuccacgacgacgagucgugucgcuacgaagggcaagucgcuguuuaccaggauguauacgcgguugacggaccgacaagucucuaucaccaagccaauaagggaguuagagucgccuacuggauaggcuuugacaccaccccuuuuauguuuaagaacuuggcuggagcauauccaucauacucuaccaacugggccgacgaaaccguguuaacggcucguaacauaggccuaugcagcucugacguuauggagcggucacguagagggauguccauucuuagaaagaaguauuugaaaccauccaacaauguucuauucucuguuggcucgaccaucuaccacgagaagagggacuuacugaggagcuggcaccugccgucuguauuucacuuacguggcaagcaaaauuacacaugucggugugagacuauaguuaguugcgacggguacgucguuaaaagaauagcuaucaguccaggccuguaugggaagccuucaggcuaugcugcuacgaugcaccgcgagggauucuugugcugcaaagugacagacacauugaacggggagagggucucuuuucccgugugcacguaugugccagcuacauugugugaccaaaugacuggcauacuggcaacagaugucagugcggacgacgcgcaaaaacugcugguugggcucaaccagcguauagucgucaacggucgcacccagagaaacaccaauaccaugaaaaauuaccuuuugcccguaguggcccaggcauuugcuaggugggcaaaggaauauaaggaagaucaagaagaugaaaggccacuaggacuacgagauagacaguuagucaugggguguuguugggcuuuuagaaggcacaagauaacaucuauuuauaagcgcccggauacccaaaccaucaucaaagugaacagcgauuuccacucauucgugcugcccaggauaggcaguaacacauuggagaucgggcugagaacaagaaucaggaaaauguuagaggagcacaaggagccgucaccucucauuaccgccgaggacguacaagaagcuaagugcgcagccgaugaggcuaaggaggugcgugaagccgaggaguugcgcgcagcucuaccaccuuuggcagcugauguugaggagcccacucuggaagccgaugucgacuugauguuacaagaggcuggggccggcucaguggagacaccucguggcuugauaaagguuaccagcuacgauggcgaggacaagaucggcucuuacgcugugcuuucuccgcaggcuguacucaagagugaaaaauuaucuugcauccacccucucgcugaacaagucauagugauaacacacucuggccgaaaagggcguuaugccguggaaccauaccaugguaaaguaguggugccagagggacaugcaauacccguccaggacuuucaagcucugagugaaagugccaccauuguguacaacgaacgugaguucguaaacagguaccugcaccauauugccacacauggaggagcgcugaacacugaugaagaauauuacaaaacugucaagcccagcgagcacgacggcgaauaccuguacgacaucgacaggaaacagugcgucaagaaagaacuagucacugggcuagggcucacaggcgagcugguggauccucccuuccaugaauucgccuacgagagucugagaacacgaccagccgcuccuuaccaaguaccaaccauagggguguauggcgugccaggaucaggcaagucuggcaucauuaaaagcgcagucaccaaaaaagaucuaguggugagcgccaagaaagaaaacugugcagaaauuauaagggacgucaagaaaaugaaagggcuggacgucaaugccagaacuguggacucagugcucuugaauggaugcaaacaccccguagagacccuguauauugacgaagcuuuugcuugucaugcagguacucucagagcgcucauagccauuauaagaccuaaaaaggcagugcucugcggggaucccaaacagugcgguuuuuuuaacaugaugugccugaaagugcauuuuaaccacgagauuugcacacaagucuuccacaaaagcaucucucgccguugcacuaaaucugugacuucggucgucucaaccuuguuuuacgacaaaaaaaugagaacgacgaauccgaaagagacuaagauugugauugacacuaccggcaguaccaaaccuaagcaggacgaucucauucucacuuguuucagagggugggugaagcaguugcaaauagauuacaaaggcaacgaaauaaugacggcagcugccucucaagggcugacccguaaagguguguaugccguucgguacaaggugaaugaaaauccucuguacgcacccaccucagaacaugugaacguccuacugacccgcacggaggaccgcaucguguggaaaacacuagccggcgacccauggauaaaaacacugacugccaaguacccugggaauuucacugccacgauagaggaguggcaagcagagcaugaugccaucaugaggcacaucuuggagagaccggacccuaccgacgucuuccagaauaaggcaaacguguguugggccaaggcuuuagugccggugcugaagaccgcuggcauagacaugaccacugaacaauggaacacuguggauuauuuugaaacggacaaagcucacucagcagagauaguauugaaccaacuaugcgugagguucuuuggacucgaucuggacuccggucuauuuucugcacccacuguuccguuauccauuaggaauaaucacugggauaacuccccgucgccuaacauguacgggcugaauaaagaagugguccgucagcucucucgcagguacccacaacugccucgggcaguugccacuggaagagucuaugacaugaacacugguacacugcgcaauuaugauccgcgcauaaaccuaguaccuguaaacagaagacugccucaugcuuuaguccuccaccauaaugaacacccacagagugacuuuucuucauucgucagcaaauugaagggcagaacuguccugguggucggggaaaaguuguccgucccaggcaaaaugguugacugguugucagaccggccugaggcuaccuucagagcucggcuggauuuaggcaucccaggugaugugcccaaauaugacauaauauuuguuaaugugaggaccccauauaaauaccaucacuaucagcagugugaagaccaugccauuaagcuuagcauguugaccaagaaagcuugucugcaucugaaucccggcggaaccugugucagcauagguuaugguuacgcugacagggccagcgaaagcaucauuggugcuauagcgcggcaguucaaguuuucccggguaugcaaaccgaaauccucacuugaagagacggaaguucuguuuguauucauuggguacgaucgcaaggcccguacgcacaauccuuacaagcuuucaucaaccuugaccaacauuuauacagguuccagacuccacgaagccggaugugcacccucauaucauguggugcgaggggauauugccacggccaccgaaggagugauuauaaaugcugcuaacagcaaaggacaaccuggcggaggggugugcggagcgcuguauaagaaauucccggaaagcuucgauuuacagccgaucgaaguaggaaaagcgcgacuggucaaaggugcagcuaaacauaucauucaugccguaggaccaaacuucaacaaaguuucggagguugaaggugacaaacaguuggcagaggcuuaugaguccaucgcuaagauugucaacgauaacaauuacaagucaguagcgauuccacuguuguccaccggcaucuuuuccgggaacaaagaucgacuaacccaaucauugaaccauuugcugacagcuuuagacaccacugaugcagauguagccauauacugcagggacaagaaaugggaaaugacucucaaggaagcaguggcuaggagagaagcaguggaggagauaugcauauccgacgacucuucagugacagaaccugaugcagagcuggugagggugcauccgaagaguucuuuggcuggaaggaagggcuacagcacaagcgauggcaaaacuuucucauauuuggaagggaccaaguuucaccaggcggccaaggauauagcagaaauuaaugccauguggcccguugcaacggaggccaaugagcagguaugcauguauauccucggagaaagcaugagcaguauuaggucgaaaugccccgucgaagagucggaagccuccacaccaccuagcacgcugccuugcuugugcauccaugccaugacuccagaaagaguacagcgccuaaaagccucacguccagaacaaauuacugugugcucauccuuuccauugccgaaguauagaaucacuggugugcagaagauccaaugcucccagccuauauuguucucaccgaaagugccugcguauauucauccaaggaaguaucucguggaaacaccaccgguagacgagacuccggagccaucggcagagaaccaauccacagaggggacaccugaacaaccaccacuuauaaccgaggaugagaccaggacuagaacgccugagccgaucaucaucgaagaggaagaagaggauagcauaaguuugcugucagauggcccgacccaccaggugcugcaagucgaggcagacauucacgggccgcccucuguaucuagcucauccugguccauuccucaugcauccgacuuugauguggacaguuuauccauacuugacacccuggagggagcuagcgugaccagcggggcaacgucagccgagacuaacucuuacuucgcaaagaguauggaguuucuggcgcgaccggugccugcgccucgaacaguauucaggaacccuccacaucccgcuccgcgcacaagaacaccgucacuugcacccagcagggccugcucgagaaccagccuaguuuccaccccgccaggcgugaauagggugaucacuagagaggagcucgaggcgcuuaccccgucacgcacuccuagcaggucggucucgagaaccagccuggucuccaacccgccaggcguaaauagggugauuacaagagaggaguuugaggcguucguagcacaacaacaaugacgguuugaugcgggugcauacaucuuuuccuccgacaccggucaagggcauuuacaacaaaaaucaguaaggcaaacggugcuauccgaagugguguuggagaggaccgaauuggagauuucguaugccccgcgccucgaccaagaaaaagaagaauuacuacgcaagaaauuacaguuaaaucccacaccugcuaacagaagcagauaccaguccaggaagguggagaacaugaaagccauaacagcuagacguauucugcaaggccuagggcauuauuugaaggcagaaggaaaaguggagugcuaccgaacccugcauccuguuccuuuguauucaucuagugugaaccgugccuuuucaagccccaaggucgcaguggaagccuguaacgccauguugaaagagaacuuuccgacuguggcuucuuacuguauuauuccagaguacgaugccuauuuggacaugguugacggagcuucaugcugcuuagacacugccaguuuuugcccugcaaagcugcgcagcuuuccaaagaaacacuccuauuuggaacccacaauacgaucggcagugccuucagcgauccagaacacgcuccagaacguccuggcagcugccacaaaaagaaauugcaaugucacgcaaaugagagaauugcccguauuggauucggcggccuuuaauguggaaugcuucaagaaauaugcguguaauaaugaauauugggaaacguuuaaagaaaaccccaucaggcuuacugaagaaaacgugguaaauuacauuaccaaauuaaaaggaccaaaagcugcugcucuuuuugcgaagacacauaauuugaauauguugcaggacauaccaauggacagguuuguaauggacuuaaagagagacgugaaagugacuccaggaacaaaacauacugaagaacggcccaagguacaggugauccaggcugccgauccgcuagcaacagcguaucugugcggaauccaccgagagcugguuaggagauuaaaugcgguccugcuuccgaacauucauacacuguuugauaugucggcugaagacuuugacgcuauuauagccgagcacuuccagccuggggauuguguucuggaaacugacaucgcgucguuugauaaaagugaggacgacgccauggcucugaccgcguuaaugauucuggaagacuuagguguggacgcagagcuguugacgcugauugaggcggcuuucggcgaaauuucaucaauacauuugcccacuaaaacuaaauuuaaauucggagccaugaugaaaucuggaauguuccucacacuguuugugaacacagucauuaacauuguaaucgcaagcagaguguugagagaacggcuaaccggaucaccaugugcagcauucauuggagaugacaauaucgugaaaggagucaaaucggacaaauuaauggcagacaggugcgccaccugguugaauauggaagucaagauuauagaugcuguggugggcgagaaagcgccuuauuucuguggaggguuuauuuugugugacuccgugaccggcacagcgugccguguggcagacccccuaaaaaggcuguuuaagcuuggcaaaccucuggcagcagacgaugaacaugaugaugacaggagaagggcauugcaugaagagucaacacgcuggaaccgaguggguauucuuucagagcugugcaaggcaguagaaucaagguaugaaaccguaggaacuuccaucauaguuauggccaugacuacucuagcuagcaguguuaaaucauucagcuaccugagaggggccccuauaacucucuacggcuaaccugaauggacuacgacauagucuaguccgccaag

SEQ ID NO: 173 - RNA, 186 nt, Artificial Sequence
  Description of Artificial Sequence: Synthetic polynucleotide
  SAM VEE TC-83 replicon 7562-7747
ucuagacggcgcgcccacccagcggccgcauacagcagcaauuggcaagcugcuuacauagaacucgcggcgauuggcaugccgccuuaaaauuuuuauuuuauuuuucuuuucuuuuccgaaucggauuuuguuuuuaauauuucaaaaaaaaaaaaaaaaaaaaaaaaaaaaaaaaaaaaaaaa

SEQ ID NO: 174 - DNA, 7561 bp, Artificial Sequence
  Description of Artificial Sequence: Synthetic polynucleotide
  SAM VEE TC-83 replicon 1-7561
ataggcggcgcatgagagaagcccagaccaattacctacccaaaatggagaaagttcacgttgacatcgaggaagacagcccattcctcagagctttgcagcggagcttcccgcagtttgaggtagaagccaagcaggtcactgataatgaccatgctaatgccagagcgttttcgcatctggcttcaaaactgatcgaaacggaggtggacccatccgacacgatccttgacattggaagtgcgcccgcccgcagaatgtattctaagcacaagtatcattgtatctgtccgatgagatgtgcggaagatccggacagattgtataagtatgcaactaagctgaagaaaaactgtaaggaaataactgataaggaattggacaagaaaatgaaggagctcgccgccgtcatgagcgaccctgacctggaaactgagactatgtgcctccacgacgacgagtcgtgtcgctacgaagggcaagtcgctgtttaccaggatgtatacgcggttgacggaccgacaagtctctatcaccaagccaataagggagttagagtcgcctactggataggctttgacaccaccccttttatgtttaagaacttggctggagcatatccatcatactctaccaactgggccgacgaaaccgtgttaacggctcgtaacataggcctatgcagctctgacgttatggagcggtcacgtagagggatgtccattcttagaaagaagtatttgaaaccatccaacaatgttctattctctgttggctcgaccatctaccacgagaagagggacttactgaggagctggcacctgccgtctgtatttcacttacgtggcaagcaaaattacacatgtcggtgtgagactatagttagttgcgacgggtacgtcgttaaaagaatagctatcagtccaggcctgtatgggaagccttcaggctatgctgctacgatgcaccgcgagggattcttgtgctgcaaagtgacagacacattgaacggggagagggtctcttttcccgtgtgcacgtatgtgccagctacattgtgtgaccaaatgactggcatactggcaacagatgtcagtgcggacgacgcgcaaaaactgctggttgggctcaaccagcgtatagtcgtcaacggtcgcacccagagaaacaccaataccatgaaaaattaccttttgcccgtagtggcccaggcatttgctaggtgggcaaaggaatataaggaagatcaagaagatgaaaggccactaggactacgagatagacagttagtcatggggtgttgttgggcttttagaaggcacaagataacatctatttataagcgcccggatacccaaaccatcatcaaagtgaacagcgatttccactcattcgtgctgcccaggataggcagtaacacattggagatcgggctgagaacaagaatcaggaaaatgttagaggagcacaaggagccgtcacctctcattaccgccgaggacgtacaagaagctaagtgcgcagccgatgaggctaaggaggtgcgtgaagccgaggagttgcgcgcagctctaccacctttggcagctgatgttgaggagcccactctggaagccgatgtcgacttgatgttacaagaggctggggccggctcagtggagacacctcgtggcttgataaaggttaccagctacgatggcgaggacaagatcggctcttacgctgtgctttctccgcaggctgtactcaagagtgaaaaattatcttgcatccaccctctcgctgaacaagtcatagtgataacacactctggccgaaaagggcgttatgccgtggaaccataccatggtaaagtagtggtgccagagggacatgcaatacccgtccaggactttcaagctctgagtgaaagtgccaccattgtgtacaacgaacgtgagttcgtaaacaggtacctgcaccatattgccacacatggaggagcgctgaacactgatgaagaatattacaaaactgtcaagcccagcgagcacgacggcgaatacctgtacgacatcgacaggaaacagtgcgtcaagaaagaactagtcactgggctagggctcacaggcgagctggtggatcctcccttccatgaattcgcctacgagagtctgagaacacgaccagccgctccttaccaagtaccaaccataggggtgtatggcgtgccaggatcaggcaagtctggcatcattaaaagcgcagtcaccaaaaaagatctagtggtgagcgccaagaaagaaaactgtgcagaaattataagggacgtcaagaaaatgaaagggctggacgtcaatgccagaactgtggactcagtgctcttgaatggatgcaaacaccccgtagagaccctgtatattgacgaagcttttgcttgtcatgcaggtactctcagagcgctcatagccattataagacctaaaaaggcagtgctctgcggggatcccaaacagtgcggtttttttaacatgatgtgcctgaaagtgcattttaaccacgagatttgcacacaagtcttccacaaaagcatctctcgccgttgcactaaatctgtgacttcggtcgtctcaaccttgttttacgacaaaaaaatgagaacgacgaatccgaaagagactaagattgtgattgacactaccggcagtaccaaacctaagcaggacgatctcattctcacttgtttcagagggtgggtgaagcagttgcaaatagattacaaaggcaacgaaataatgacggcagctgcctctcaagggctgacccgtaaaggtgtgtatgccgttcggtacaaggtgaatgaaaatcctctgtacgcacccacctcagaacatgtgaacgtcctactgacccgcacggaggaccgcatcgtgtggaaaacactagccggcgacccatggataaaaacactgactgccaagtaccctgggaatttcactgccacgatagaggagtggcaagcagagcatgatgccatcatgaggcacatcttggagagaccggaccctaccgacgtcttccagaataaggcaaacgtgtgttgggccaaggctttagtgccggtgctgaagaccgctggcatagacatgaccactgaacaatggaacactgtggattattttgaaacggacaaagctcactcagcagagatagtattgaaccaactatgcgtgaggttctttggactcgatctggactccggtctattttctgcacccactgttccgttatccattaggaataatcactgggataactccccgtcgcctaacatgtacgggctgaataaagaagtggtccgtcagctctctcgcaggtacccacaactgcctcgggcagttgccactggaagagtctatgacatgaacactggtacactgcgcaattatgatccgcgcataaacctagtacctgtaaacagaagactgcctcatgctttagtcctccaccataatgaacacccacagagtgacttttcttcattcgtcagcaaattgaagggcagaactgtcctggtggtcggggaaaagttgtccgtcccaggcaaaatggttgactggttgtcagaccggcctgaggctaccttcagagctcggctggatttaggcatcccaggtgatgtgcccaaatatgacataatatttgttaatgtgaggaccccatataaataccatcactatcagcagtgtgaagaccatgccattaagcttagcatgttgaccaagaaagcttgtctgcatctgaatcccggcggaacctgtgtcagcataggttatggttacgctgacagggccagcgaaagcatcattggtgctatagcgcggcagttcaagttttcccgggtatgcaaaccgaaatcctcacttgaagagacggaagttctgtttgtattcattgggtacgatcgcaaggcccgtacgcacaatccttacaagctttcatcaaccttgaccaacatttatacaggttccagactccacgaagccggatgtgcaccctcatatcatgtggtgcgaggggatattgccacggccaccgaaggagtgattataaatgctgctaacagcaaaggacaacctggcggaggggtgtgcggagcgctgtataagaaattcccggaaagcttcgatttacagccgatcgaagtaggaaaagcgcgactggtcaaaggtgcagctaaacatatcattcatgccgtaggaccaaacttcaacaaagtttcggaggttgaaggtgacaaacagttggcagaggcttatgagtccatcgctaagattgtcaacgataacaattacaagtcagtagcgattccactgttgtccaccggcatcttttccgggaacaaagatcgactaacccaatcattgaaccatttgctgacagctttagacaccactgatgcagatgtagccatatactgcagggacaagaaatgggaaatgactctcaaggaagcagtggctaggagagaagcagtggaggagatatgcatatccgacgactcttcagtgacagaacctgatgcagagctggtgagggtgcatccgaagagttctttggctggaaggaagggctacagcacaagcgatggcaaaactttctcatatttggaagggaccaagtttcaccaggcggccaaggatatagcagaaattaatgccatgtggcccgttgcaacggaggccaatgagcaggtatgcatgtatatcctcggagaaagcatgagcagtattaggtcgaaatgccccgtcgaagagtcggaagcctccacaccacctagcacgctgccttgcttgtgcatccatgccatgactccagaaagagtacagcgcctaaaagcctcacgtccagaacaaattactgtgtgctcatcctttccattgccgaagtatagaatcactggtgtgcagaagatccaatgctcccagcctatattgttctcaccgaaagtgcctgcgtatattcatccaaggaagtatctcgtggaaacaccaccggtagacgagactccggagccatcggcagagaaccaatccacagaggggacacctgaacaaccaccacttataaccgaggatgagaccaggactagaacgcctgagccgatcatcatcgaagaggaagaagaggatagcataagtttgctgtcagatggcccgacccaccaggtgctgcaagtcgaggcagacattcacgggccgccctctgtatctagctcatcctggtccattcctcatgcatccgactttgatgtggacagtttatccatacttgacaccctggagggagctagcgtgaccagcggggcaacgtcagccgagactaactcttacttcgcaaagagtatggagtttctggcgcgaccggtgcctgcgcctcgaacagtattcaggaaccctccacatcccgctccgcgcacaagaacaccgtcacttgcacccagcagggcctgctcgagaaccagcctagtttccaccccgccaggcgtgaatagggtgatcactagagaggagctcgaggcgcttaccccgtcacgcactcctagcaggtcggtctcgagaaccagcctggtctccaacccgccaggcgtaaatagggtgattacaagagaggagtttgaggcgttcgtagcacaacaacaatgacggtttgatgcgggtgcatacatcttttcctccgacaccggtcaagggcatttacaacaaaaatcagtaaggcaaacggtgctatccgaagtggtgttggagaggaccgaattggagatttcgtatgccccgcgcctcgaccaagaaaaagaagaattactacgcaagaaattacagttaaatcccacacctgctaacagaagcagataccagtccaggaaggtggagaacatgaaagccataacagctagacgtattctgcaaggcctagggcattatttgaaggcagaaggaaaagtggagtgctaccgaaccctgcatcctgttcctttgtattcatctagtgtgaaccgtgccttttcaagccccaaggtcgcagtggaagcctgtaacgccatgttgaaagagaactttccgactgtggcttcttactgtattattccagagtacgatgcctatttggacatggttgacggagcttcatgctgcttagacactgccagtttttgccctgcaaagctgcgcagctttccaaagaaacactcctatttggaacccacaatacgatcggcagtgccttcagcgatccagaacacgctccagaacgtcctggcagctgccacaaaaagaaattgcaatgtcacgcaaatgagagaattgcccgtattggattcggcggcctttaatgtggaatgcttcaagaaatatgcgtgtaataatgaatattgggaaacgtttaaagaaaaccccatcaggcttactgaagaaaacgtggtaaattacattaccaaattaaaaggaccaaaagctgctgctctttttgcgaagacacataatttgaatatgttgcaggacataccaatggacaggtttgtaatggacttaaagagagacgtgaaagtgactccaggaacaaaacatactgaagaacggcccaaggtacaggtgatccaggctgccgatccgctagcaacagcgtatctgtgcggaatccaccgagagctggttaggagattaaatgcggtcctgcttccgaacattcatacactgtttgatatgtcggctgaagactttgacgctattatagccgagcacttccagcctggggattgtgttctggaaactgacatcgcgtcgtttgataaaagtgaggacgacgccatggctctgaccgcgttaatgattctggaagacttaggtgtggacgcagagctgttgacgctgattgaggcggctttcggcgaaatttcatcaatacatttgcccactaaaactaaatttaaattcggagccatgatgaaatctggaatgttcctcacactgtttgtgaacacagtcattaacattgtaatcgcaagcagagtgttgagagaacggctaaccggatcaccatgtgcagcattcattggagatgacaatatcgtgaaaggagtcaaatcggacaaattaatggcagacaggtgcgccacctggttgaatatggaagtcaagattatagatgctgtggtgggcgagaaagcgccttatttctgtggagggtttattttgtgtgactccgtgaccggcacagcgtgccgtgtggcagaccccctaaaaaggctgtttaagcttggcaaacctctggcagcagacgatgaacatgatgatgacaggagaagggcattgcatgaagagtcaacacgctggaaccgagtgggtattctttcagagctgtgcaaggcagtagaatcaaggtatgaaaccgtaggaacttccatcatagttatggccatgactactctagctagcagtgttaaatcattcagctacctgagaggggcccctataactctctacggctaacctgaatggactacgacatagtctagtccgccaag

SEQ ID NO: 175 - DNA, 2439 bp, Artificial Sequence
  Description of Artificial Sequence: Synthetic polynucleotide
  SAM VEE TC-83 replicon 7562-10000
tctagacggcgcgcccacccagcggccgcatacagcagcaattggcaagctgcttacatagaactcgcggcgattggcatgccgccttaaaatttttattttatttttcttttcttttccgaatcggattttgtttttaatatttcaaaaaaaaaaaaaaaaaaaaaaaaaaaaaaaaaaaaaaaagaagagcgtttaaacacgtgatatctggcctcatgggccttcctttcactgcccgctttccagtcgggaaacctgtcgtgccagctgcattaacatggtcatagctgtttccttgcgtattgggcgctctccgcttcctcgctcactgactcgctgcgctcggtcgttcgggtaaagcctggggtgcctaatgagcaaaaggccagcaaaaggccaggaaccgtaaaaaggccgcgttgctggcgtttttccataggctccgcccccctgacgagcatcacaaaaatcgacgctcaagtcagaggtggcgaaacccgacaggactataaagataccaggcgtttccccctggaagctccctcgtgcgctctcctgttccgaccctgccgcttaccggatacctgtccgcctttctcccttcgggaagcgtggcgctttctcatagctcacgctgtaggtatctcagttcggtgtaggtcgttcgctccaagctgggctgtgtgcacgaaccccccgttcagcccgaccgctgcgccttatccggtaactatcgtcttgagtccaacccggtaagacacgacttatcgccactggcagcagccactggtaacaggattagcagagcgaggtatgtaggcggtgctacagagttcttgaagtggtggcctaactacggctacactagaagaacagtatttggtatctgcgctctgctgaagccagttaccttcggaaaaagagttggtagctcttgatccggcaaacaaaccaccgctggtagcggtggtttttttgtttgcaagcagcagattacgcgcagaaaaaaaggatctcaagaagatcctttgatcttttctacggggtctgacgctcagtggaacgaaaactcacgttaagggattttggtcatgaatacacggtgcctgactgcgttagcaatttaactgtgataaactaccgcattaaagcttatcgatgataagctgtcaaacatgagaattcttagaaaaactcatcgagcatcaaatgaaactgcaatttattcatatcaggattatcaataccatatttttgaaaaagccgtttctgtaatgaaggagaaaactcaccgaggcagttccataggatggcaagatcctggtatcggtctgcgattccgactcgtccaacatcaatacaacctattaatttcccctcgtcaaaaataaggttatcaagtgagaaatcaccatgagtgacgactgaatccggtgagaatggcaaaagcttatgcatttctttccagacttgttcaacaggccagccattacgctcgtcatcaaaatcactcgcatcaaccaaaccgttattcattcgtgattgcgcctgagcgagacgaaatacgcgatcgctgttaaaaggacaattacaaacaggaatcgaatgcaaccggcgcaggaacactgccagcgcatcaacaatattttcacctgaatcaggatattcttctaatacctggaatgctgttttcccggggatcgcagtggtgagtaaccatgcatcatcaggagtacggataaaatgcttgatggtcggaagaggcataaattccgtcagccagtttagtctgaccatctcatctgtaacatcattggcaacgctacctttgccatgtttcagaaacaactctggcgcatcgggcttcccatacaatcgatagattgtcgcacctgattgcccgacattatcgcgagcccatttatacccatataaatcagcatccatgttggaatttaatcgcggcctcgagcaagacgtttcccgttgaatatggctcataacaccccttgtattactgtttatgtaagcagacagttttattgttcatgagcggatacatatttgaatgtatttagaaaaataaacaaataggggttccgcgcacatttccccgaaaagtgccacctaaattgtaagcgttaatattttgttaaaattcgcgttaaatttttgttaaatcagctcattttttaaccaataggccgaaatcggcaaaatcccttataaatcaaaagaatagaccgagatagggttgagtggccgctacagggcgctcccattcgccattcaggctgcgcaactgttgggaagggcgtttcggtgcgggcctcttcgctattacgccagctggcgaaagggggatgtgctgcaaggcgattaagttgggtaacgccagggttttcccagtcacacgcgtaatacgactcactatag

SEQ ID NO: 176 - RNA, 11575 nt, Artificial Sequence
  Description of Artificial Sequence: Synthetic polynucleotide
auaggcggcgcaugagagaagcccagaccaauuaccuacccaaaauggagaaaguucacguugacaucgaggaagacagcccauuccucagagcuuugcagcggagcuucccgcaguuugagguagaagccaagcaggucacugauaaugaccaugcuaaugccagagcguuuucgcaucuggcuucaaaacugaucgaaacggagguggacccauccgacacgauccuugacauuggaagugcgcccgcccgcagaauguauucuaagcacaaguaucauuguaucuguccgaugagaugugcggaagauccggacagauuguauaaguaugcaacuaagcugaagaaaaacuguaaggaaauaacugauaaggaauuggacaagaaaaugaaggagcucgccgccgucaugagcgacccugaccuggaaacugagacuaugugccuccacgacgacgagucgugucgcuacgaagggcaagucgcuguuuaccaggauguauacgcgguugacggaccgacaagucucuaucaccaagccaauaagggaguuagagucgccuacuggauaggcuuugacaccaccccuuuuauguuuaagaacuuggcuggagcauauccaucauacucuaccaacugggccgacgaaaccguguuaacggcucguaacauaggccuaugcagcucugacguuauggagcggucacguagagggauguccauucuuagaaagaaguauuugaaaccauccaacaauguucuauucucuguuggcucgaccaucuaccacgagaagagggacuuacugaggagcuggcaccugccgucuguauuucacuuacguggcaagcaaaauuacacaugucggugugagacuauaguuaguugcgacggguacgucguuaaaagaauagcuaucaguccaggccuguaugggaagccuucaggcuaugcugcuacgaugcaccgcgagggauucuugugcugcaaagugacagacacauugaacggggagagggucucuuuucccgugugcacguaugugccagcuacauugugugaccaaaugacuggcauacuggcaacagaugucagugcggacgacgcgcaaaaacugcugguugggcucaaccagcguauagucgucaacggucgcacccagagaaacaccaauaccaugaaaaauuaccuuuugcccguaguggcccaggcauuugcuaggugggcaaaggaauauaaggaagaucaagaagaugaaaggccacuaggacuacgagauagacaguuagucaugggguguuguugggcuuuuagaaggcacaagauaacaucuauuuauaagcgcccggauacccaaaccaucaucaaagugaacagcgauuuccacucauucgugcugcccaggauaggcaguaacacauuggagaucgggcugagaacaagaaucaggaaaauguuagaggagcacaaggagccgucaccucucauuaccgccgaggacguacaagaagcuaagugcgcagccgaugaggcuaaggaggugcgugaagccgaggaguugcgcgcagcucuaccaccuuuggcagcugauguugaggagcccacucuggaagccgaugucgacuugauguuacaagaggcuggggccggcucaguggagacaccucguggcuugauaaagguuaccagcuacgauggcgaggacaagaucggcucuuacgcugugcuuucuccgcaggcuguacucaagagugaaaaauuaucuugcauccacccucucgcugaacaagucauagugauaacacacucuggccgaaaagggcguuaugccguggaaccauaccaugguaaaguaguggugccagagggacaugcaauacccguccaggacuuucaagcucugagugaaagugccaccauuguguacaacgaacgugaguucguaaacagguaccugcaccauauugccacacauggaggagcgcugaacacugaugaagaauauuacaaaacugucaagcccagcgagcacgacggcgaauaccuguacgacaucgacaggaaacagugcgucaagaaagaacuagucacugggcuagggcucacaggcgagcugguggauccucccuuccaugaauucgccuacgagagucugagaacacgaccagccgcuccuuaccaaguaccaaccauagggguguauggcgugccaggaucaggcaagucuggcaucauuaaaagcgcagucaccaaaaaagaucuaguggugagcgccaagaaagaaaacugugcagaaauuauaagggacgucaagaaaaugaaagggcuggacgucaaugccagaacuguggacucagugcucuugaauggaugcaaacaccccguagagacccuguauauugacgaagcuuuugcuugucaugcagguacucucagagcgcucauagccauuauaagaccuaaaaaggcagugcucugcggggaucccaaacagugcgguuuuuuuaacaugaugugccugaaagugcauuuuaaccacgagauuugcacacaagucuuccacaaaagcaucucucgccguugcacuaaaucugugacuucggucgucucaaccuuguuuuacgacaaaaaaaugagaacgacgaauccgaaagagacuaagauugugauugacacuaccggcaguaccaaaccuaagcaggacgaucucauucucacuuguuucagagggugggugaagcaguugcaaauagauuacaaaggcaacgaaauaaugacggcagcugccucucaagggcugacccguaaagguguguaugccguucgguacaaggugaaugaaaauccucuguacgcacccaccucagaacaugugaacguccuacugacccgcacggaggaccgcaucguguggaaaacacuagccggcgacccauggauaaaaacacugacugccaaguacccugggaauuucacugccacgauagaggaguggcaagcagagcaugaugccaucaugaggcacaucuuggagagaccggacccuaccgacgucuuccagaauaaggcaaacguguguugggccaaggcuuuagugccggugcugaagaccgcuggcauagacaugaccacugaacaauggaacacuguggauuauuuugaaacggacaaagcucacucagcagagauaguauugaaccaacuaugcgugagguucuuuggacucgaucuggacuccggucuauuuucugcacccacuguuccguuauccauuaggaauaaucacugggauaacuccccgucgccuaacauguacgggcugaauaaagaagugguccgucagcucucucgcagguacccacaacugccucgggcaguugccacuggaagagucuaugacaugaacacugguacacugcgcaauuaugauccgcgcauaaaccuaguaccuguaaacagaagacugccucaugcuuuaguccuccaccauaaugaacacccacagagugacuuuucuucauucgucagcaaauugaagggcagaacuguccugguggucggggaaaaguuguccgucccaggcaaaaugguugacugguugucagaccggccugaggcuaccuucagagcucggcuggauuuaggcaucccaggugaugugcccaaauaugacauaauauuuguuaaugugaggaccccauauaaauaccaucacuaucagcagugugaagaccaugccauuaagcuuagcauguugaccaagaaagcuugucugcaucugaaucccggcggaaccugugucagcauagguuaugguuacgcugacagggccagcgaaagcaucauuggugcuauagcgcggcaguucaaguuuucccggguaugcaaaccgaaauccucacuugaagagacggaaguucuguuuguauucauuggguacgaucgcaaggcccguacgcacaauccuuacaagcuuucaucaaccuugaccaacauuuauacagguuccagacuccacgaagccggaugugcacccucauaucauguggugcgaggggauauugccacggccaccgaaggagugauuauaaaugcugcuaacagcaaaggacaaccuggcggaggggugugcggagcgcuguauaagaaauucccggaaagcuucgauuuacagccgaucgaaguaggaaaagcgcgacuggucaaaggugcagcuaaacauaucauucaugccguaggaccaaacuucaacaaaguuucggagguugaaggugacaaacaguuggcagaggcuuaugaguccaucgcuaagauugucaacgauaacaauuacaagucaguagcgauuccacuguuguccaccggcaucuuuuccgggaacaaagaucgacuaacccaaucauugaaccauuugcugacagcuuuagacaccacugaugcagauguagccauauacugcagggacaagaaaugggaaaugacucucaaggaagcaguggcuaggagagaagcaguggaggagauaugcauauccgacgacucuucagugacagaaccugaugcagagcuggugagggugcauccgaagaguucuuuggcuggaaggaagggcuacagcacaagcgauggcaaaacuuucucauauuuggaagggaccaaguuucaccaggcggccaaggauauagcagaaauuaaugccauguggcccguugcaacggaggccaaugagcagguaugcauguauauccucggagaaagcaugagcaguauuaggucgaaaugccccgucgaagagucggaagccuccacaccaccuagcacgcugccuugcuugugcauccaugccaugacuccagaaagaguacagcgccuaaaagccucacguccagaacaaauuacugugugcucauccuuuccauugccgaaguauagaaucacuggugugcagaagauccaaugcucccagccuauauuguucucaccgaaagugccugcguauauucauccaaggaaguaucucguggaaacaccaccgguagacgagacuccggagccaucggcagagaaccaauccacagaggggacaccugaacaaccaccacuuauaaccgaggaugagaccaggacuagaacgccugagccgaucaucaucgaagaggaagaagaggauagcauaaguuugcugucagauggcccgacccaccaggugcugcaagucgaggcagacauucacgggccgcccucuguaucuagcucauccugguccauuccucaugcauccgacuuugauguggacaguuuauccauacuugacacccuggagggagcuagcgugaccagcggggcaacgucagccgagacuaacucuuacuucgcaaagaguauggaguuucuggcgcgaccggugccugcgccucgaacaguauucaggaacccuccacaucccgcuccgcgcacaagaacaccgucacuugcacccagcagggccugcucgagaaccagccuaguuuccaccccgccaggcgugaauagggugaucacuagagaggagcucgaggcgcuuaccccgucacgcacuccuagcaggucggucucgagaaccagccuggucuccaacccgccaggcguaaauagggugauuacaagagaggaguuugaggcguucguagcacaacaacaaugacgguuugaugcgggugcauacaucuuuuccuccgacaccggucaagggcauuuacaacaaaaaucaguaaggcaaacggugcuauccgaagugguguuggagaggaccgaauuggagauuucguaugccccgcgccucgaccaagaaaaagaagaauuacuacgcaagaaauuacaguuaaaucccacaccugcuaacagaagcagauaccaguccaggaagguggagaacaugaaagccauaacagcuagacguauucugcaaggccuagggcauuauuugaaggcagaaggaaaaguggagugcuaccgaacccugcauccuguuccuuuguauucaucuagugugaaccgugccuuuucaagccccaaggucgcaguggaagccuguaacgccauguugaaagagaacuuuccgacuguggcuucuuacuguauuauuccagaguacgaugccuauuuggacaugguugacggagcuucaugcugcuuagacacugccaguuuuugcccugcaaagcugcgcagcuuuccaaagaaacacuccuauuuggaacccacaauacgaucggcagugccuucagcgauccagaacacgcuccagaacguccuggcagcugccacaaaaagaaauugcaaugucacgcaaaugagagaauugcccguauuggauucggcggccuuuaauguggaaugcuucaagaaauaugcguguaauaaugaauauugggaaacguuuaaagaaaaccccaucaggcuuacugaagaaaacgugguaaauuacauuaccaaauuaaaaggaccaaaagcugcugcucuuuuugcgaagacacauaauuugaauauguugcaggacauaccaauggacagguuuguaauggacuuaaagagagacgugaaagugacuccaggaacaaaacauacugaagaacggcccaagguacaggugauccaggcugccgauccgcuagcaacagcguaucugugcggaauccaccgagagcugguuaggagauuaaaugcgguccugcuuccgaacauucauacacuguuugauaugucggcugaagacuuugacgcuauuauagccgagcacuuccagccuggggauuguguucuggaaacugacaucgcgucguuugauaaaagugaggacgacgccauggcucugaccgcguuaaugauucuggaagacuuagguguggacgcagagcuguugacgcugauugaggcggcuuucggcgaaauuucaucaauacauuugcccacuaaaacuaaauuuaaauucggagccaugaugaaaucuggaauguuccucacacuguuugugaacacagucauuaacauuguaaucgcaagcagaguguugagagaacggcuaaccggaucaccaugugcagcauucauuggagaugacaauaucgugaaaggagucaaaucggacaaauuaauggcagacaggugcgccaccugguugaauauggaagucaagauuauagaugcuguggugggcgagaaagcgccuuauuucuguggaggguuuauuuugugugacuccgugaccggcacagcgugccguguggcagacccccuaaaaaggcuguuuaagcuuggcaaaccucuggcagcagacgaugaacaugaugaugacaggagaagggcauugcaugaagagucaacacgcuggaaccgaguggguauucuuucagagcugugcaaggcaguagaaucaagguaugaaaccguaggaacuuccaucauaguuauggccaugacuacucuagcuagcaguguuaaaucauucagcuaccugagaggggccccuauaacucucuacggcuaaccugaauggacuacgacauagucuaguccgccaagauguuuguuuuucuuguucuucugccauuggugucuucccaaugugugaacuugacuacccgcacacagcucccgccggcguacacuaacuccuucacccgggggguuuacuacccggacaaaguguuccgcagcaguguccugcauucaacacaagauuuguuccuuccauucuuuagcaaugucacuugguuccaugcuauacacgugaguggcacuaacggcacuaagcgcuucgauaacccgguucugccguuuaaugauggcguuuacuucgcaaguacugagaaaucaaacauuauacggggguggauauucgguacuacauuggauaguaaaacucaaagccuuuugauugucaacaaugcaacuaauguagucauaaaaguuugugaauuccaauucuguaacgaucccuuucuugguguguauuaccacaagaauaacaaaucauggauggagucugaauuucgaguauacaguagcgccaauaauugcacguuugaguauguaagccagccguuucugauggacuuggaaggaaagcaaggcaacuuuaagaaccucagggaguucguauucaaaaauauagacgguuacuucaagauuuacucaaaacauacaccuaucaacuugguccgagaucucccacaagguuuuucagcgcucgagccauugguggaccugcccaucggaaucaacauuacccgauuccagacacugcuugcacugcaccggaguuaucucacacccggcgacagcucgucugguuggacggcgggagcugccgcuuacuaugucgguuacuugcaaccucggacauuucuucugaaguauaacgaaaacgguacgaucaccgaugccguagacugcgcucucgauccccuuucagagacgaagugcacgcucaaaucauuuacuguggaaaaaggaauuuaucaaacgagcaauuucagggugcaacccacggaguccaucguacgauucccaaacauaacaaaucuuugcccguuuggcgagguuuuuaaugcuacgcgcuuugcaucaguguacgcuuggaauaggaaacgaaucucaaauuguguugcggauuauuccguguuguauaauuccgcaagcuucuccaccuuuaaauguuauggcgugucccccacaaaacuuaacgaucuuugcuuuacaaaugucuaugcggauucauucguuauccgaggggaugaagugcgacaaaucgcuccugggcagacagggaagauagcugauuacaauuacaaacuuccagacgauuuuacaggauguguaaucgcguggaacucaaacaauuuggacaguaagguugguggcaacuacaauuaucuguauagacuuuucagaaaaaguaaccucaaaccuuucgaacgcgacauuagcacugagauauaccaggccggaucaacuccuuguaacgguguugaagguuucaacuguuacuuuccgcuccaauccuacggcuuucaaccaacgaacggugucggguaccaaccauacagaguugucgucuugaguuuugagcuuuugcacgcaccugcaaccgugugugguccgaagaaaaguacuaaucugguuaaaaauaaaugcgucaauuucaacuuuaauggguugacgggcacaggcgugcugacagaguccaauaaaaaguuuuugcccuuucagcaguuugggagggacaucgccgauacgaccgaugccguccgagauccucaaacccuugaaauauuggacauuacccccuguaguuuuggcgguguaagugugauuacucccggaacgaauacaucuaaccagguagcggugcuuuaucaagaugucaacuguacagagguccccguggcgauucacgccgaucaguugacacccacauggaggguuuacagcacaggauccaacgucuuccagacgagagcaggaugcuugaucggugccgagcaugugaauaacagcuacgaaugugacauuccgauuggugcuggaaucugcgcaaguuaccaaacucaaacgaauuccccuggcuccgccuccucuguggcaucccagucuauaaucgcguauacgaugucacugggcgccgagaauucugucgcauauagcaacaacuccaucgcaauacccacaaauuuuacaauuucugugaccacggaaauucugcccgucagcaugacaaaaacuagcguggacugcacgauguauaucugcggcgacuccacagaguguuccaaccuccucuugcaauauggcagcuuuugcacacaauugaaccgagcgcucaccgggauagcggucgagcaagauaagaauacccaagagguguuugcccaggugaagcaaaucuauaagaccccuccaauaaaggauuuuggcggcuucaauuucucacaaauuuugcccgauccaucuaagccguccaagcgaucauuuauugaggaucugcuguucaacaaagucacucucgccgacgcgggguuuauuaaacaauauggcgauugccugggcgacaucgccgccagggaccuuauaugcgcccagaaguucaacggucucaccgugcugccaccauuguugacugacgaaaugaucgcacaguauacgucagcgcugcuggcugguaccauuacuucuggcuggacauucggagccggugcagcccuucagauuccauuugcaaugcagauggccuauagauuuaauggaauaggagugacgcagaacguauuguacgagaaucaaaaguugaucgcaaaccaguucaauucugccauuggaaagauacaagauucccuuucuucuaccgccucagcccuggguaaguugcaagaugucgucaaccaaaaugcacaggcuuugaauaccuugguaaaacaauugucauccaauuucggcgccauaagcucaguacuuaacgauaucuugucacgauuggauccccccgaagccgagguccaaaucgauaggcucaucacgggacggcuccagagccuucaaaccuaugugacgcaacaacugauacgggccgcagaaauccgagcguccgccaacuuggcagcuaccaagauguccgaauguguacugggucaaucaaagagaguugauuucuguggaaaaggauaccaucucaugucauucccccaaagcgccccgcacggcgucguguuccuccaugugacuuacguuccagcacaagaaaaaaacuucacaacugcgcccgcuaucugccaugacgggaaggcgcacuucccacgagaggguguauuugugucaaauggaacgcacugguucguaacgcaaaggaacuucuaugaaccgcagauaaucacgacugacaacacuuuuguaucuggcaauugugauguggucaucgggauaguuaacaacacugucuaugacccgcugcaacccgagcuugauucauuuaaagaagaacucgauaaauauuucaagaaucacaccagucccgauguggaccuuggagacauuuccgggauaaaugccucugugguaaacauccaaaaggaaaucgaucggcugaaugaaguggccaaaaacuugaacgaaagucugauagaccuucaggagcucgggaaguaugaacaauacauaaaguggccaugguacaucuggcuuggguucaucgcuggccucauagccaucguuaugguuaccaucaugcucugcuguaugacuuccuguuguuccugucucaaaggguguugcagcugugguagcugcugcaaauuugacgaggaugacucagaacccgucuugaagggagucaaguugcacuacacuuagugauaaucuagacggcgcgcccacccagcggccgcauacagcagcaauuggcaagcugcuuacauagaacucgcggcgauuggcaugccgccuuaaaauuuuuauuuuauuuuucuuuucuuuuccgaaucggauuuuguuuuuaauauuucaaaaaaaaaaaaaaaaaaaaaaaaaaaaaaaaaaaaaaaa

SEQ ID NO: 177 - DNA, 11575 bp, Artificial Sequence
  Description of Artificial Sequence: Synthetic polynucleotide
ataggcggcgcatgagagaagcccagaccaattacctacccaaaatggagaaagttcacgttgacatcgaggaagacagcccattcctcagagctttgcagcggagcttcccgcagtttgaggtagaagccaagcaggtcactgataatgaccatgctaatgccagagcgttttcgcatctggcttcaaaactgatcgaaacggaggtggacccatccgacacgatccttgacattggaagtgcgcccgcccgcagaatgtattctaagcacaagtatcattgtatctgtccgatgagatgtgcggaagatccggacagattgtataagtatgcaactaagctgaagaaaaactgtaaggaaataactgataaggaattggacaagaaaatgaaggagctcgccgccgtcatgagcgaccctgacctggaaactgagactatgtgcctccacgacgacgagtcgtgtcgctacgaagggcaagtcgctgtttaccaggatgtatacgcggttgacggaccgacaagtctctatcaccaagccaataagggagttagagtcgcctactggataggctttgacaccaccccttttatgtttaagaacttggctggagcatatccatcatactctaccaactgggccgacgaaaccgtgttaacggctcgtaacataggcctatgcagctctgacgttatggagcggtcacgtagagggatgtccattcttagaaagaagtatttgaaaccatccaacaatgttctattctctgttggctcgaccatctaccacgagaagagggacttactgaggagctggcacctgccgtctgtatttcacttacgtggcaagcaaaattacacatgtcggtgtgagactatagttagttgcgacgggtacgtcgttaaaagaatagctatcagtccaggcctgtatgggaagccttcaggctatgctgctacgatgcaccgcgagggattcttgtgctgcaaagtgacagacacattgaacggggagagggtctcttttcccgtgtgcacgtatgtgccagctacattgtgtgaccaaatgactggcatactggcaacagatgtcagtgcggacgacgcgcaaaaactgctggttgggctcaaccagcgtatagtcgtcaacggtcgcacccagagaaacaccaataccatgaaaaattaccttttgcccgtagtggcccaggcatttgctaggtgggcaaaggaatataaggaagatcaagaagatgaaaggccactaggactacgagatagacagttagtcatggggtgttgttgggcttttagaaggcacaagataacatctatttataagcgcccggatacccaaaccatcatcaaagtgaacagcgatttccactcattcgtgctgcccaggataggcagtaacacattggagatcgggctgagaacaagaatcaggaaaatgttagaggagcacaaggagccgtcacctctcattaccgccgaggacgtacaagaagctaagtgcgcagccgatgaggctaaggaggtgcgtgaagccgaggagttgcgcgcagctctaccacctttggcagctgatgttgaggagcccactctggaagccgatgtcgacttgatgttacaagaggctggggccggctcagtggagacacctcgtggcttgataaaggttaccagctacgatggcgaggacaagatcggctcttacgctgtgctttctccgcaggctgtactcaagagtgaaaaattatcttgcatccaccctctcgctgaacaagtcatagtgataacacactctggccgaaaagggcgttatgccgtggaaccataccatggtaaagtagtggtgccagagggacatgcaatacccgtccaggactttcaagctctgagtgaaagtgccaccattgtgtacaacgaacgtgagttcgtaaacaggtacctgcaccatattgccacacatggaggagcgctgaacactgatgaagaatattacaaaactgtcaagcccagcgagcacgacggcgaatacctgtacgacatcgacaggaaacagtgcgtcaagaaagaactagtcactgggctagggctcacaggcgagctggtggatcctcccttccatgaattcgcctacgagagtctgagaacacgaccagccgctccttaccaagtaccaaccataggggtgtatggcgtgccaggatcaggcaagtctggcatcattaaaagcgcagtcaccaaaaaagatctagtggtgagcgccaagaaagaaaactgtgcagaaattataagggacgtcaagaaaatgaaagggctggacgtcaatgccagaactgtggactcagtgctcttgaatggatgcaaacaccccgtagagaccctgtatattgacgaagcttttgcttgtcatgcaggtactctcagagcgctcatagccattataagacctaaaaaggcagtgctctgcggggatcccaaacagtgcggtttttttaacatgatgtgcctgaaagtgcattttaaccacgagatttgcacacaagtcttccacaaaagcatctctcgccgttgcactaaatctgtgacttcggtcgtctcaaccttgttttacgacaaaaaaatgagaacgacgaatccgaaagagactaagattgtgattgacactaccggcagtaccaaacctaagcaggacgatctcattctcacttgtttcagagggtgggtgaagcagttgcaaatagattacaaaggcaacgaaataatgacggcagctgcctctcaagggctgacccgtaaaggtgtgtatgccgttcggtacaaggtgaatgaaaatcctctgtacgcacccacctcagaacatgtgaacgtcctactgacccgcacggaggaccgcatcgtgtggaaaacactagccggcgacccatggataaaaacactgactgccaagtaccctgggaatttcactgccacgatagaggagtggcaagcagagcatgatgccatcatgaggcacatcttggagagaccggaccctaccgacgtcttccagaataaggcaaacgtgtgttgggccaaggctttagtgccggtgctgaagaccgctggcatagacatgaccactgaacaatggaacactgtggattattttgaaacggacaaagctcactcagcagagatagtattgaaccaactatgcgtgaggttctttggactcgatctggactccggtctattttctgcacccactgttccgttatccattaggaataatcactgggataactccccgtcgcctaacatgtacgggctgaataaagaagtggtccgtcagctctctcgcaggtacccacaactgcctcgggcagttgccactggaagagtctatgacatgaacactggtacactgcgcaattatgatccgcgcataaacctagtacctgtaaacagaagactgcctcatgctttagtcctccaccataatgaacacccacagagtgacttttcttcattcgtcagcaaattgaagggcagaactgtcctggtggtcggggaaaagttgtccgtcccaggcaaaatggttgactggttgtcagaccggcctgaggctaccttcagagctcggctggatttaggcatcccaggtgatgtgcccaaatatgacataatatttgttaatgtgaggaccccatataaataccatcactatcagcagtgtgaagaccatgccattaagcttagcatgttgaccaagaaagcttgtctgcatctgaatcccggcggaacctgtgtcagcataggttatggttacgctgacagggccagcgaaagcatcattggtgctatagcgcggcagttcaagttttcccgggtatgcaaaccgaaatcctcacttgaagagacggaagttctgtttgtattcattgggtacgatcgcaaggcccgtacgcacaatccttacaagctttcatcaaccttgaccaacatttatacaggttccagactccacgaagccggatgtgcaccctcatatcatgtggtgcgaggggatattgccacggccaccgaaggagtgattataaatgctgctaacagcaaaggacaacctggcggaggggtgtgcggagcgctgtataagaaattcccggaaagcttcgatttacagccgatcgaagtaggaaaagcgcgactggtcaaaggtgcagctaaacatatcattcatgccgtaggaccaaacttcaacaaagtttcggaggttgaaggtgacaaacagttggcagaggcttatgagtccatcgctaagattgtcaacgataacaattacaagtcagtagcgattccactgttgtccaccggcatcttttccgggaacaaagatcgactaacccaatcattgaaccatttgctgacagctttagacaccactgatgcagatgtagccatatactgcagggacaagaaatgggaaatgactctcaaggaagcagtggctaggagagaagcagtggaggagatatgcatatccgacgactcttcagtgacagaacctgatgcagagctggtgagggtgcatccgaagagttctttggctggaaggaagggctacagcacaagcgatggcaaaactttctcatatttggaagggaccaagtttcaccaggcggccaaggatatagcagaaattaatgccatgtggcccgttgcaacggaggccaatgagcaggtatgcatgtatatcctcggagaaagcatgagcagtattaggtcgaaatgccccgtcgaagagtcggaagcctccacaccacctagcacgctgccttgcttgtgcatccatgccatgactccagaaagagtacagcgcctaaaagcctcacgtccagaacaaattactgtgtgctcatcctttccattgccgaagtatagaatcactggtgtgcagaagatccaatgctcccagcctatattgttctcaccgaaagtgcctgcgtatattcatccaaggaagtatctcgtggaaacaccaccggtagacgagactccggagccatcggcagagaaccaatccacagaggggacacctgaacaaccaccacttataaccgaggatgagaccaggactagaacgcctgagccgatcatcatcgaagaggaagaagaggatagcataagtttgctgtcagatggcccgacccaccaggtgctgcaagtcgaggcagacattcacgggccgccctctgtatctagctcatcctggtccattcctcatgcatccgactttgatgtggacagtttatccatacttgacaccctggagggagctagcgtgaccagcggggcaacgtcagccgagactaactcttacttcgcaaagagtatggagtttctggcgcgaccggtgcctgcgcctcgaacagtattcaggaaccctccacatcccgctccgcgcacaagaacaccgtcacttgcacccagcagggcctgctcgagaaccagcctagtttccaccccgccaggcgtgaatagggtgatcactagagaggagctcgaggcgcttaccccgtcacgcactcctagcaggtcggtctcgagaaccagcctggtctccaacccgccaggcgtaaatagggtgattacaagagaggagtttgaggcgttcgtagcacaacaacaatgacggtttgatgcgggtgcatacatcttttcctccgacaccggtcaagggcatttacaacaaaaatcagtaaggcaaacggtgctatccgaagtggtgttggagaggaccgaattggagatttcgtatgccccgcgcctcgaccaagaaaaagaagaattactacgcaagaaattacagttaaatcccacacctgctaacagaagcagataccagtccaggaaggtggagaacatgaaagccataacagctagacgtattctgcaaggcctagggcattatttgaaggcagaaggaaaagtggagtgctaccgaaccctgcatcctgttcctttgtattcatctagtgtgaaccgtgccttttcaagccccaaggtcgcagtggaagcctgtaacgccatgttgaaagagaactttccgactgtggcttcttactgtattattccagagtacgatgcctatttggacatggttgacggagcttcatgctgcttagacactgccagtttttgccctgcaaagctgcgcagctttccaaagaaacactcctatttggaacccacaatacgatcggcagtgccttcagcgatccagaacacgctccagaacgtcctggcagctgccacaaaaagaaattgcaatgtcacgcaaatgagagaattgcccgtattggattcggcggcctttaatgtggaatgcttcaagaaatatgcgtgtaataatgaatattgggaaacgtttaaagaaaaccccatcaggcttactgaagaaaacgtggtaaattacattaccaaattaaaaggaccaaaagctgctgctctttttgcgaagacacataatttgaatatgttgcaggacataccaatggacaggtttgtaatggacttaaagagagacgtgaaagtgactccaggaacaaaacatactgaagaacggcccaaggtacaggtgatccaggctgccgatccgctagcaacagcgtatctgtgcggaatccaccgagagctggttaggagattaaatgcggtcctgcttccgaacattcatacactgtttgatatgtcggctgaagactttgacgctattatagccgagcacttccagcctggggattgtgttctggaaactgacatcgcgtcgtttgataaaagtgaggacgacgccatggctctgaccgcgttaatgattctggaagacttaggtgtggacgcagagctgttgacgctgattgaggcggctttcggcgaaatttcatcaatacatttgcccactaaaactaaatttaaattcggagccatgatgaaatctggaatgttcctcacactgtttgtgaacacagtcattaacattgtaatcgcaagcagagtgttgagagaacggctaaccggatcaccatgtgcagcattcattggagatgacaatatcgtgaaaggagtcaaatcggacaaattaatggcagacaggtgcgccacctggttgaatatggaagtcaagattatagatgctgtggtgggcgagaaagcgccttatttctgtggagggtttattttgtgtgactccgtgaccggcacagcgtgccgtgtggcagaccccctaaaaaggctgtttaagcttggcaaacctctggcagcagacgatgaacatgatgatgacaggagaagggcattgcatgaagagtcaacacgctggaaccgagtgggtattctttcagagctgtgcaaggcagtagaatcaaggtatgaaaccgtaggaacttccatcatagttatggccatgactactctagctagcagtgttaaatcattcagctacctgagaggggcccctataactctctacggctaacctgaatggactacgacatagtctagtccgccaagatgtttgtttttcttgttcttctgccattggtgtcttcccaatgtgtgaacttgactacccgcacacagctcccgccggcgtacactaactccttcacccggggggtttactacccggacaaagtgttccgcagcagtgtcctgcattcaacacaagatttgttccttccattctttagcaatgtcacttggttccatgctatacacgtgagtggcactaacggcactaagcgcttcgataacccggttctgccgtttaatgatggcgtttacttcgcaagtactgagaaatcaaacattatacgggggtggatattcggtactacattggatagtaaaactcaaagccttttgattgtcaacaatgcaactaatgtagtcataaaagtttgtgaattccaattctgtaacgatccctttcttggtgtgtattaccacaagaataacaaatcatggatggagtctgaatttcgagtatacagtagcgccaataattgcacgtttgagtatgtaagccagccgtttctgatggacttggaaggaaagcaaggcaactttaagaacctcagggagttcgtattcaaaaatatagacggttacttcaagatttactcaaaacatacacctatcaacttggtccgagatctcccacaaggtttttcagcgctcgagccattggtggacctgcccatcggaatcaacattacccgattccagacactgcttgcactgcaccggagttatctcacacccggcgacagctcgtctggttggacggcgggagctgccgcttactatgtcggttacttgcaacctcggacatttcttctgaagtataacgaaaacggtacgatcaccgatgccgtagactgcgctctcgatcccctttcagagacgaagtgcacgctcaaatcatttactgtggaaaaaggaatttatcaaacgagcaatttcagggtgcaacccacggagtccatcgtacgattcccaaacataacaaatctttgcccgtttggcgaggtttttaatgctacgcgctttgcatcagtgtacgcttggaataggaaacgaatctcaaattgtgttgcggattattccgtgttgtataattccgcaagcttctccacctttaaatgttatggcgtgtcccccacaaaacttaacgatctttgctttacaaatgtctatgcggattcattcgttatccgaggggatgaagtgcgacaaatcgctcctgggcagacagggaagatagctgattacaattacaaacttccagacgattttacaggatgtgtaatcgcgtggaactcaaacaatttggacagtaaggttggtggcaactacaattatctgtatagacttttcagaaaaagtaacctcaaacctttcgaacgcgacattagcactgagatataccaggccggatcaactccttgtaacggtgttgaaggtttcaactgttactttccgctccaatcctacggctttcaaccaacgaacggtgtcgggtaccaaccatacagagttgtcgtcttgagttttgagcttttgcacgcacctgcaaccgtgtgtggtccgaagaaaagtactaatctggttaaaaataaatgcgtcaatttcaactttaatgggttgacgggcacaggcgtgctgacagagtccaataaaaagtttttgccctttcagcagtttgggagggacatcgccgatacgaccgatgccgtccgagatcctcaaacccttgaaatattggacattaccccctgtagttttggcggtgtaagtgtgattactcccggaacgaatacatctaaccaggtagcggtgctttatcaagatgtcaactgtacagaggtccccgtggcgattcacgccgatcagttgacacccacatggagggtttacagcacaggatccaacgtcttccagacgagagcaggatgcttgatcggtgccgagcatgtgaataacagctacgaatgtgacattccgattggtgctggaatctgcgcaagttaccaaactcaaacgaattcccctggctccgcctcctctgtggcatcccagtctataatcgcgtatacgatgtcactgggcgccgagaattctgtcgcatatagcaacaactccatcgcaatacccacaaattttacaatttctgtgaccacggaaattctgcccgtcagcatgacaaaaactagcgtggactgcacgatgtatatctgcggcgactccacagagtgttccaacctcctcttgcaatatggcagcttttgcacacaattgaaccgagcgctcaccgggatagcggtcgagcaagataagaatacccaagaggtgtttgcccaggtgaagcaaatctataagacccctccaataaaggattttggcggcttcaatttctcacaaattttgcccgatccatctaagccgtccaagcgatcatttattgaggatctgctgttcaacaaagtcactctcgccgacgcggggtttattaaacaatatggcgattgcctgggcgacatcgccgccagggaccttatatgcgcccagaagttcaacggtctcaccgtgctgccaccattgttgactgacgaaatgatcgcacagtatacgtcagcgctgctggctggtaccattacttctggctggacattcggagccggtgcagcccttcagattccatttgcaatgcagatggcctatagatttaatggaataggagtgacgcagaacgtattgtacgagaatcaaaagttgatcgcaaaccagttcaattctgccattggaaagatacaagattccctttcttctaccgcctcagccctgggtaagttgcaagatgtcgtcaaccaaaatgcacaggctttgaataccttggtaaaacaattgtcatccaatttcggcgccataagctcagtacttaacgatatcttgtcacgattggatccccccgaagccgaggtccaaatcgataggctcatcacgggacggctccagagccttcaaacctatgtgacgcaacaactgatacgggccgcagaaatccgagcgtccgccaacttggcagctaccaagatgtccgaatgtgtactgggtcaatcaaagagagttgatttctgtggaaaaggataccatctcatgtcattcccccaaagcgccccgcacggcgtcgtgttcctccatgtgacttacgttccagcacaagaaaaaaacttcacaactgcgcccgctatctgccatgacgggaaggcgcacttcccacgagagggtgtatttgtgtcaaatggaacgcactggttcgtaacgcaaaggaacttctatgaaccgcagataatcacgactgacaacacttttgtatctggcaattgtgatgtggtcatcgggatagttaacaacactgtctatgacccgctgcaacccgagcttgattcatttaaagaagaactcgataaatatttcaagaatcacaccagtcccgatgtggaccttggagacatttccgggataaatgcctctgtggtaaacatccaaaaggaaatcgatcggctgaatgaagtggccaaaaacttgaacgaaagtctgatagaccttcaggagctcgggaagtatgaacaatacataaagtggccatggtacatctggcttgggttcatcgctggcctcatagccatcgttatggttaccatcatgctctgctgtatgacttcctgttgttcctgtctcaaagggtgttgcagctgtggtagctgctgcaaatttgacgaggatgactcagaacccgtcttgaagggagtcaagttgcactacacttagtgataatctagacggcgcgcccacccagcggccgcatacagcagcaattggcaagctgcttacatagaactcgcggcgattggcatgccgccttaaaatttttattttatttttcttttcttttccgaatcggattttgtttttaatatttcaaaaaaaaaaaaaaaaaaaaaaaaaaaaaaaaaaaaaaaa

SEQ ID NO: 178 - RNA, 11464 nt, Artificial Sequence
  Description of Artificial Sequence: Synthetic polynucleotide
auaggcggcgcaugagagaagcccagaccaauuaccuacccaaaauggagaaaguucacguugacaucgaggaagacagcccauuccucagagcuuugcagcggagcuucccgcaguuugagguagaagccaagcaggucacugauaaugaccaugcuaaugccagagcguuuucgcaucuggcuucaaaacugaucgaaacggagguggacccauccgacacgauccuugacauuggaagugcgcccgcccgcagaauguauucuaagcacaaguaucauuguaucuguccgaugagaugugcggaagauccggacagauuguauaaguaugcaacuaagcugaagaaaaacuguaaggaaauaacugauaaggaauuggacaagaaaaugaaggagcucgccgccgucaugagcgacccugaccuggaaacugagacuaugugccuccacgacgacgagucgugucgcuacgaagggcaagucgcuguuuaccaggauguauacgcgguugacggaccgacaagucucuaucaccaagccaauaagggaguuagagucgccuacuggauaggcuuugacaccaccccuuuuauguuuaagaacuuggcuggagcauauccaucauacucuaccaacugggccgacgaaaccguguuaacggcucguaacauaggccuaugcagcucugacguuauggagcggucacguagagggauguccauucuuagaaagaaguauuugaaaccauccaacaauguucuauucucuguuggcucgaccaucuaccacgagaagagggacuuacugaggagcuggcaccugccgucuguauuucacuuacguggcaagcaaaauuacacaugucggugugagacuauaguuaguugcgacggguacgucguuaaaagaauagcuaucaguccaggccuguaugggaagccuucaggcuaugcugcuacgaugcaccgcgagggauucuugugcugcaaagugacagacacauugaacggggagagggucucuuuucccgugugcacguaugugccagcuacauugugugaccaaaugacuggcauacuggcaacagaugucagugcggacgacgcgcaaaaacugcugguugggcucaaccagcguauagucgucaacggucgcacccagagaaacaccaauaccaugaaaaauuaccuuuugcccguaguggcccaggcauuugcuaggugggcaaaggaauauaaggaagaucaagaagaugaaaggccacuaggacuacgagauagacaguuagucaugggguguuguugggcuuuuagaaggcacaagauaacaucuauuuauaagcgcccggauacccaaaccaucaucaaagugaacagcgauuuccacucauucgugcugcccaggauaggcaguaacacauuggagaucgggcugagaacaagaaucaggaaaauguuagaggagcacaaggagccgucaccucucauuaccgccgaggacguacaagaagcuaagugcgcagccgaugaggcuaaggaggugcgugaagccgaggaguugcgcgcagcucuaccaccuuuggcagcugauguugaggagcccacucuggaagccgaugucgacuugauguuacaagaggcuggggccggcucaguggagacaccucguggcuugauaaagguuaccagcuacgauggcgaggacaagaucggcucuuacgcugugcuuucuccgcaggcuguacucaagagugaaaaauuaucuugcauccacccucucgcugaacaagucauagugauaacacacucuggccgaaaagggcguuaugccguggaaccauaccaugguaaaguaguggugccagagggacaugcaauacccguccaggacuuucaagcucugagugaaagugccaccauuguguacaacgaacgugaguucguaaacagguaccugcaccauauugccacacauggaggagcgcugaacacugaugaagaauauuacaaaacugucaagcccagcgagcacgacggcgaauaccuguacgacaucgacaggaaacagugcgucaagaaagaacuagucacugggcuagggcucacaggcgagcugguggauccucccuuccaugaauucgccuacgagagucugagaacacgaccagccgcuccuuaccaaguaccaaccauagggguguauggcgugccaggaucaggcaagucuggcaucauuaaaagcgcagucaccaaaaaagaucuaguggugagcgccaagaaagaaaacugugcagaaauuauaagggacgucaagaaaaugaaagggcuggacgucaaugccagaacuguggacucagugcucuugaauggaugcaaacaccccguagagacccuguauauugacgaagcuuuugcuugucaugcagguacucucagagcgcucauagccauuauaagaccuaaaaaggcagugcucugcggggaucccaaacagugcgguuuuuuuaacaugaugugccugaaagugcauuuuaaccacgagauuugcacacaagucuuccacaaaagcaucucucgccguugcacuaaaucugugacuucggucgucucaaccuuguuuuacgacaaaaaaaugagaacgacgaauccgaaagagacuaagauugugauugacacuaccggcaguaccaaaccuaagcaggacgaucucauucucacuuguuucagagggugggugaagcaguugcaaauagauuacaaaggcaacgaaauaaugacggcagcugccucucaagggcugacccguaaagguguguaugccguucgguacaaggugaaugaaaauccucuguacgcacccaccucagaacaugugaacguccuacugacccgcacggaggaccgcaucguguggaaaacacuagccggcgacccauggauaaaaacacugacugccaaguacccugggaauuucacugccacgauagaggaguggcaagcagagcaugaugccaucaugaggcacaucuuggagagaccggacccuaccgacgucuuccagaauaaggcaaacguguguugggccaaggcuuuagugccggugcugaagaccgcuggcauagacaugaccacugaacaauggaacacuguggauuauuuugaaacggacaaagcucacucagcagagauaguauugaaccaacuaugcgugagguucuuuggacucgaucuggacuccggucuauuuucugcacccacuguuccguuauccauuaggaauaaucacugggauaacuccccgucgccuaacauguacgggcugaauaaagaagugguccgucagcucucucgcagguacccacaacugccucgggcaguugccacuggaagagucuaugacaugaacacugguacacugcgcaauuaugauccgcgcauaaaccuaguaccuguaaacagaagacugccucaugcuuuaguccuccaccauaaugaacacccacagagugacuuuucuucauucgucagcaaauugaagggcagaacuguccugguggucggggaaaaguuguccgucccaggcaaaaugguugacugguugucagaccggccugaggcuaccuucagagcucggcuggauuuaggcaucccaggugaugugcccaaauaugacauaauauuuguuaaugugaggaccccauauaaauaccaucacuaucagcagugugaagaccaugccauuaagcuuagcauguugaccaagaaagcuugucugcaucugaaucccggcggaaccugugucagcauagguuaugguuacgcugacagggccagcgaaagcaucauuggugcuauagcgcggcaguucaaguuuucccggguaugcaaaccgaaauccucacuugaagagacggaaguucuguuuguauucauuggguacgaucgcaaggcccguacgcacaauccuuacaagcuuucaucaaccuugaccaacauuuauacagguuccagacuccacgaagccggaugugcacccucauaucauguggugcgaggggauauugccacggccaccgaaggagugauuauaaaugcugcuaacagcaaaggacaaccuggcggaggggugugcggagcgcuguauaagaaauucccggaaagcuucgauuuacagccgaucgaaguaggaaaagcgcgacuggucaaaggugcagcuaaacauaucauucaugccguaggaccaaacuucaacaaaguuucggagguugaaggugacaaacaguuggcagaggcuuaugaguccaucgcuaagauugucaacgauaacaauuacaagucaguagcgauuccacuguuguccaccggcaucuuuuccgggaacaaagaucgacuaacccaaucauugaaccauuugcugacagcuuuagacaccacugaugcagauguagccauauacugcagggacaagaaaugggaaaugacucucaaggaagcaguggcuaggagagaagcaguggaggagauaugcauauccgacgacucuucagugacagaaccugaugcagagcuggugagggugcauccgaagaguucuuuggcuggaaggaagggcuacagcacaagcgauggcaaaacuuucucauauuuggaagggaccaaguuucaccaggcggccaaggauauagcagaaauuaaugccauguggcccguugcaacggaggccaaugagcagguaugcauguauauccucggagaaagcaugagcaguauuaggucgaaaugccccgucgaagagucggaagccuccacaccaccuagcacgcugccuugcuugugcauccaugccaugacuccagaaagaguacagcgccuaaaagccucacguccagaacaaauuacugugugcucauccuuuccauugccgaaguauagaaucacuggugugcagaagauccaaugcucccagccuauauuguucucaccgaaagugccugcguauauucauccaaggaaguaucucguggaaacaccaccgguagacgagacuccggagccaucggcagagaaccaauccacagaggggacaccugaacaaccaccacuuauaaccgaggaugagaccaggacuagaacgccugagccgaucaucaucgaagaggaagaagaggauagcauaaguuugcugucagauggcccgacccaccaggugcugcaagucgaggcagacauucacgggccgcccucuguaucuagcucauccugguccauuccucaugcauccgacuuugauguggacaguuuauccauacuugacacccuggagggagcuagcgugaccagcggggcaacgucagccgagacuaacucuuacuucgcaaagaguauggaguuucuggcgcgaccggugccugcgccucgaacaguauucaggaacccuccacaucccgcuccgcgcacaagaacaccgucacuugcacccagcagggccugcucgagaaccagccuaguuuccaccccgccaggcgugaauagggugaucacuagagaggagcucgaggcgcuuaccccgucacgcacuccuagcaggucggucucgagaaccagccuggucuccaacccgccaggcguaaauagggugauuacaagagaggaguuugaggcguucguagcacaacaacaaugacgguuugaugcgggugcauacaucuuuuccuccgacaccggucaagggcauuuacaacaaaaaucaguaaggcaaacggugcuauccgaagugguguuggagaggaccgaauuggagauuucguaugccccgcgccucgaccaagaaaaagaagaauuacuacgcaagaaauuacaguuaaaucccacaccugcuaacagaagcagauaccaguccaggaagguggagaacaugaaagccauaacagcuagacguauucugcaaggccuagggcauuauuugaaggcagaaggaaaaguggagugcuaccgaacccugcauccuguuccuuuguauucaucuagugugaaccgugccuuuucaagccccaaggucgcaguggaagccuguaacgccauguugaaagagaacuuuccgacuguggcuucuuacuguauuauuccagaguacgaugccuauuuggacaugguugacggagcuucaugcugcuuagacacugccaguuuuugcccugcaaagcugcgcagcuuuccaaagaaacacuccuauuuggaacccacaauacgaucggcagugccuucagcgauccagaacacgcuccagaacguccuggcagcugccacaaaaagaaauugcaaugucacgcaaaugagagaauugcccguauuggauucggcggccuuuaauguggaaugcuucaagaaauaugcguguaauaaugaauauugggaaacguuuaaagaaaaccccaucaggcuuacugaagaaaacgugguaaauuacauuaccaaauuaaaaggaccaaaagcugcugcucuuuuugcgaagacacauaauuugaauauguugcaggacauaccaauggacagguuuguaauggacuuaaagagagacgugaaagugacuccaggaacaaaacauacugaagaacggcccaagguacaggugauccaggcugccgauccgcuagcaacagcguaucugugcggaauccaccgagagcugguuaggagauuaaaugcgguccugcuuccgaacauucauacacuguuugauaugucggcugaagacuuugacgcuauuauagccgagcacuuccagccuggggauuguguucuggaaacugacaucgcgucguuugauaaaagugaggacgacgccauggcucugaccgcguuaaugauucuggaagacuuagguguggacgcagagcuguugacgcugauugaggcggcuuucggcgaaauuucaucaauacauuugcccacuaaaacuaaauuuaaauucggagccaugaugaaaucuggaauguuccucacacuguuugugaacacagucauuaacauuguaaucgcaagcagaguguugagagaacggcuaaccggaucaccaugugcagcauucauuggagaugacaauaucgugaaaggagucaaaucggacaaauuaauggcagacaggugcgccaccugguugaauauggaagucaagauuauagaugcuguggugggcgagaaagcgccuuauuucuguggaggguuuauuuugugugacuccgugaccggcacagcgugccguguggcagacccccuaaaaaggcuguuuaagcuuggcaaaccucuggcagcagacgaugaacaugaugaugacaggagaagggcauugcaugaagagucaacacgcuggaaccgaguggguauucuuucagagcugugcaaggcaguagaaucaagguaugaaaccguaggaacuuccaucauaguuauggccaugacuacucuagcuagcaguguuaaaucauucagcuaccugagaggggccccuauaacucucuacggcuaaccugaauggacuacgacauagucuaguccgccaagauguuuguuuuucuuguucuucugccauuggugucuucccaaugugugaacuugacuacccgcacacagcucccgccggcguacacuaacuccuucacccgggggguuuacuacccggacaaaguguuccgcagcaguguccugcauucaacacaagauuuguuccuuccauucuuuagcaaugucacuugguuccaugcuauacacgugaguggcacuaacggcacuaagcgcuucgauaacccgguucugccguuuaaugauggcguuuacuucgcaaguacugagaaaucaaacauuauacggggguggauauucgguacuacauuggauaguaaaacucaaagccuuuugauugucaacaaugcaacuaauguagucauaaaaguuugugaauuccaauucuguaacgaucccuuucuugguguguauuaccacaagaauaacaaaucauggauggagucugaauuucgaguauacaguagcgccaauaauugcacguuugaguauguaagccagccguuucugauggacuuggaaggaaagcaaggcaacuuuaagaaccucagggaguucguauucaaaaauauagacgguuacuucaagauuuacucaaaacauacaccuaucaacuugguccgagaucucccacaagguuuuucagcgcucgagccauugguggaccugcccaucggaaucaacauuacccgauuccagacacugcuugcacugcaccggaguuaucucacacccggcgacagcucgucugguuggacggcgggagcugccgcuuacuaugucgguuacuugcaaccucggacauuucuucugaaguauaacgaaaacgguacgaucaccgaugccguagacugcgcucucgauccccuuucagagacgaagugcacgcucaaaucauuuacuguggaaaaaggaauuuaucaaacgagcaauuucagggugcaacccacggaguccaucguacgauucccaaacauaacaaaucuuugcccguuuggcgagguuuuuaaugcuacgcgcuuugcaucaguguacgcuuggaauaggaaacgaaucucaaauuguguugcggauuauuccguguuguauaauuccgcaagcuucuccaccuuuaaauguuauggcgugucccccacaaaacuuaacgaucuuugcuuuacaaaugucuaugcggauucauucguuauccgaggggaugaagugcgacaaaucgcuccugggcagacagggaagauagcugauuacaauuacaaacuuccagacgauuuuacaggauguguaaucgcguggaacucaaacaauuuggacaguaagguugguggcaacuacaauuaucuguauagacuuuucagaaaaaguaaccucaaaccuuucgaacgcgacauuagcacugagauauaccaggccggaucaacuccuuguaacgguguugaagguuucaacuguuacuuuccgcuccaauccuacggcuuucaaccaacgaacggugucggguaccaaccauacagaguugucgucuugaguuuugagcuuuugcacgcaccugcaaccgugugugguccgaagaaaaguacuaaucugguuaaaaauaaaugcgucaauuucaacuuuaauggguugacgggcacaggcgugcugacagaguccaauaaaaaguuuuugcccuuucagcaguuugggagggacaucgccgauacgaccgaugccguccgagauccucaaacccuugaaauauuggacauuacccccuguaguuuuggcgguguaagugugauuacucccggaacgaauacaucuaaccagguagcggugcuuuaucaagaugucaacuguacagagguccccguggcgauucacgccgaucaguugacacccacauggaggguuuacagcacaggauccaacgucuuccagacgagagcaggaugcuugaucggugccgagcaugugaauaacagcuacgaaugugacauuccgauuggugcuggaaucugcgcaaguuaccaaacucaaacgaauuccccuggcuccgccuccucuguggcaucccagucuauaaucgcguauacgaugucacugggcgccgagaauucugucgcauauagcaacaacuccaucgcaauacccacaaauuuuacaauuucugugaccacggaaauucugcccgucagcaugacaaaaacuagcguggacugcacgauguauaucugcggcgacuccacagaguguuccaaccuccucuugcaauauggcagcuuuugcacacaauugaaccgagcgcucaccgggauagcggucgagcaagauaagaauacccaagagguguuugcccaggugaagcaaaucuauaagaccccuccaauaaaggauuuuggcggcuucaauuucucacaaauuuugcccgauccaucuaagccguccaagcgaucauuuauugaggaucugcuguucaacaaagucacucucgccgacgcgggguuuauuaaacaauauggcgauugccugggcgacaucgccgccagggaccuuauaugcgcccagaaguucaacggucucaccgugcugccaccauuguugacugacgaaaugaucgcacaguauacgucagcgcugcuggcugguaccauuacuucuggcuggacauucggagccggugcagcccuucagauuccauuugcaaugcagauggccuauagauuuaauggaauaggagugacgcagaacguauuguacgagaaucaaaaguugaucgcaaaccaguucaauucugccauuggaaagauacaagauucccuuucuucuaccgccucagcccuggguaaguugcaagaugucgucaaccaaaaugcacaggcuuugaauaccuugguaaaacaauugucauccaauuucggcgccauaagcucaguacuuaacgauaucuugucacgauuggauccccccgaagccgagguccaaaucgauaggcucaucacgggacggcuccagagccuucaaaccuaugugacgcaacaacugauacgggccgcagaaauccgagcguccgccaacuuggcagcuaccaagauguccgaauguguacugggucaaucaaagagaguugauuucuguggaaaaggauaccaucucaugucauucccccaaagcgccccgcacggcgucguguuccuccaugugacuuacguuccagcacaagaaaaaaacuucacaacugcgcccgcuaucugccaugacgggaaggcgcacuucccacgagaggguguauuugugucaaauggaacgcacugguucguaacgcaaaggaacuucuaugaaccgcagauaaucacgacugacaacacuuuuguaucuggcaauugugauguggucaucgggauaguuaacaacacugucuaugacccgcugcaacccgagcuugauucauuuaaagaagaacucgauaaauauuucaagaaucacaccagucccgauguggaccuuggagacauuuccgggauaaaugccucugugguaaacauccaaaaggaaaucgaucggcugaaugaaguggccaaaaacuugaacgaaagucugauagaccuucaggagcucgggaaguaugaacaagggagcgguuauauuccugaagcuccaagagaugggcaagcuuacguucguaaagauggcgaauggguacuucuuucuaccuuuuuaugaugaucuagacggcgcgcccacccagcggccgcauacagcagcaauuggcaagcugcuuacauagaacucgcggcgauuggcaugccgccuuaaaauuuuuauuuuauuuuucuuuucuuuuccgaaucggauuuuguuuuuaauauuucaaaaaaaaaaaaaaaaaaaaaaaaaaaaaaaaaaaaaaaa

SEQ ID NO: 179 - DNA, 11464 bp, Artificial Sequence
  Description of Artificial Sequence: Synthetic polynucleotide
ataggcggcgcatgagagaagcccagaccaattacctacccaaaatggagaaagttcacgttgacatcgaggaagacagcccattcctcagagctttgcagcggagcttcccgcagtttgaggtagaagccaagcaggtcactgataatgaccatgctaatgccagagcgttttcgcatctggcttcaaaactgatcgaaacggaggtggacccatccgacacgatccttgacattggaagtgcgcccgcccgcagaatgtattctaagcacaagtatcattgtatctgtccgatgagatgtgcggaagatccggacagattgtataagtatgcaactaagctgaagaaaaactgtaaggaaataactgataaggaattggacaagaaaatgaaggagctcgccgccgtcatgagcgaccctgacctggaaactgagactatgtgcctccacgacgacgagtcgtgtcgctacgaagggcaagtcgctgtttaccaggatgtatacgcggttgacggaccgacaagtctctatcaccaagccaataagggagttagagtcgcctactggataggctttgacaccaccccttttatgtttaagaacttggctggagcatatccatcatactctaccaactgggccgacgaaaccgtgttaacggctcgtaacataggcctatgcagctctgacgttatggagcggtcacgtagagggatgtccattcttagaaagaagtatttgaaaccatccaacaatgttctattctctgttggctcgaccatctaccacgagaagagggacttactgaggagctggcacctgccgtctgtatttcacttacgtggcaagcaaaattacacatgtcggtgtgagactatagttagttgcgacgggtacgtcgttaaaagaatagctatcagtccaggcctgtatgggaagccttcaggctatgctgctacgatgcaccgcgagggattcttgtgctgcaaagtgacagacacattgaacggggagagggtctcttttcccgtgtgcacgtatgtgccagctacattgtgtgaccaaatgactggcatactggcaacagatgtcagtgcggacgacgcgcaaaaactgctggttgggctcaaccagcgtatagtcgtcaacggtcgcacccagagaaacaccaataccatgaaaaattaccttttgcccgtagtggcccaggcatttgctaggtgggcaaaggaatataaggaagatcaagaagatgaaaggccactaggactacgagatagacagttagtcatggggtgttgttgggcttttagaaggcacaagataacatctatttataagcgcccggatacccaaaccatcatcaaagtgaacagcgatttccactcattcgtgctgcccaggataggcagtaacacattggagatcgggctgagaacaagaatcaggaaaatgttagaggagcacaaggagccgtcacctctcattaccgccgaggacgtacaagaagctaagtgcgcagccgatgaggctaaggaggtgcgtgaagccgaggagttgcgcgcagctctaccacctttggcagctgatgttgaggagcccactctggaagccgatgtcgacttgatgttacaagaggctggggccggctcagtggagacacctcgtggcttgataaaggttaccagctacgatggcgaggacaagatcggctcttacgctgtgctttctccgcaggctgtactcaagagtgaaaaattatcttgcatccaccctctcgctgaacaagtcatagtgataacacactctggccgaaaagggcgttatgccgtggaaccataccatggtaaagtagtggtgccagagggacatgcaatacccgtccaggactttcaagctctgagtgaaagtgccaccattgtgtacaacgaacgtgagttcgtaaacaggtacctgcaccatattgccacacatggaggagcgctgaacactgatgaagaatattacaaaactgtcaagcccagcgagcacgacggcgaatacctgtacgacatcgacaggaaacagtgcgtcaagaaagaactagtcactgggctagggctcacaggcgagctggtggatcctcccttccatgaattcgcctacgagagtctgagaacacgaccagccgctccttaccaagtaccaaccataggggtgtatggcgtgccaggatcaggcaagtctggcatcattaaaagcgcagtcaccaaaaaagatctagtggtgagcgccaagaaagaaaactgtgcagaaattataagggacgtcaagaaaatgaaagggctggacgtcaatgccagaactgtggactcagtgctcttgaatggatgcaaacaccccgtagagaccctgtatattgacgaagcttttgcttgtcatgcaggtactctcagagcgctcatagccattataagacctaaaaaggcagtgctctgcggggatcccaaacagtgcggtttttttaacatgatgtgcctgaaagtgcattttaaccacgagatttgcacacaagtcttccacaaaagcatctctcgccgttgcactaaatctgtgacttcggtcgtctcaaccttgttttacgacaaaaaaatgagaacgacgaatccgaaagagactaagattgtgattgacactaccggcagtaccaaacctaagcaggacgatctcattctcacttgtttcagagggtgggtgaagcagttgcaaatagattacaaaggcaacgaaataatgacggcagctgcctctcaagggctgacccgtaaaggtgtgtatgccgttcggtacaaggtgaatgaaaatcctctgtacgcacccacctcagaacatgtgaacgtcctactgacccgcacggaggaccgcatcgtgtggaaaacactagccggcgacccatggataaaaacactgactgccaagtaccctgggaatttcactgccacgatagaggagtggcaagcagagcatgatgccatcatgaggcacatcttggagagaccggaccctaccgacgtcttccagaataaggcaaacgtgtgttgggccaaggctttagtgccggtgctgaagaccgctggcatagacatgaccactgaacaatggaacactgtggattattttgaaacggacaaagctcactcagcagagatagtattgaaccaactatgcgtgaggttctttggactcgatctggactccggtctattttctgcacccactgttccgttatccattaggaataatcactgggataactccccgtcgcctaacatgtacgggctgaataaagaagtggtccgtcagctctctcgcaggtacccacaactgcctcgggcagttgccactggaagagtctatgacatgaacactggtacactgcgcaattatgatccgcgcataaacctagtacctgtaaacagaagactgcctcatgctttagtcctccaccataatgaacacccacagagtgacttttcttcattcgtcagcaaattgaagggcagaactgtcctggtggtcggggaaaagttgtccgtcccaggcaaaatggttgactggttgtcagaccggcctgaggctaccttcagagctcggctggatttaggcatcccaggtgatgtgcccaaatatgacataatatttgttaatgtgaggaccccatataaataccatcactatcagcagtgtgaagaccatgccattaagcttagcatgttgaccaagaaagcttgtctgcatctgaatcccggcggaacctgtgtcagcataggttatggttacgctgacagggccagcgaaagcatcattggtgctatagcgcggcagttcaagttttcccgggtatgcaaaccgaaatcctcacttgaagagacggaagttctgtttgtattcattgggtacgatcgcaaggcccgtacgcacaatccttacaagctttcatcaaccttgaccaacatttatacaggttccagactccacgaagccggatgtgcaccctcatatcatgtggtgcgaggggatattgccacggccaccgaaggagtgattataaatgctgctaacagcaaaggacaacctggcggaggggtgtgcggagcgctgtataagaaattcccggaaagcttcgatttacagccgatcgaagtaggaaaagcgcgactggtcaaaggtgcagctaaacatatcattcatgccgtaggaccaaacttcaacaaagtttcggaggttgaaggtgacaaacagttggcagaggcttatgagtccatcgctaagattgtcaacgataacaattacaagtcagtagcgattccactgttgtccaccggcatcttttccgggaacaaagatcgactaacccaatcattgaaccatttgctgacagctttagacaccactgatgcagatgtagccatatactgcagggacaagaaatgggaaatgactctcaaggaagcagtggctaggagagaagcagtggaggagatatgcatatccgacgactcttcagtgacagaacctgatgcagagctggtgagggtgcatccgaagagttctttggctggaaggaagggctacagcacaagcgatggcaaaactttctcatatttggaagggaccaagtttcaccaggcggccaaggatatagcagaaattaatgccatgtggcccgttgcaacggaggccaatgagcaggtatgcatgtatatcctcggagaaagcatgagcagtattaggtcgaaatgccccgtcgaagagtcggaagcctccacaccacctagcacgctgccttgcttgtgcatccatgccatgactccagaaagagtacagcgcctaaaagcctcacgtccagaacaaattactgtgtgctcatcctttccattgccgaagtatagaatcactggtgtgcagaagatccaatgctcccagcctatattgttctcaccgaaagtgcctgcgtatattcatccaaggaagtatctcgtggaaacaccaccggtagacgagactccggagccatcggcagagaaccaatccacagaggggacacctgaacaaccaccacttataaccgaggatgagaccaggactagaacgcctgagccgatcatcatcgaagaggaagaagaggatagcataagtttgctgtcagatggcccgacccaccaggtgctgcaagtcgaggcagacattcacgggccgccctctgtatctagctcatcctggtccattcctcatgcatccgactttgatgtggacagtttatccatacttgacaccctggagggagctagcgtgaccagcggggcaacgtcagccgagactaactcttacttcgcaaagagtatggagtttctggcgcgaccggtgcctgcgcctcgaacagtattcaggaaccctccacatcccgctccgcgcacaagaacaccgtcacttgcacccagcagggcctgctcgagaaccagcctagtttccaccccgccaggcgtgaatagggtgatcactagagaggagctcgaggcgcttaccccgtcacgcactcctagcaggtcggtctcgagaaccagcctggtctccaacccgccaggcgtaaatagggtgattacaagagaggagtttgaggcgttcgtagcacaacaacaatgacggtttgatgcgggtgcatacatcttttcctccgacaccggtcaagggcatttacaacaaaaatcagtaaggcaaacggtgctatccgaagtggtgttggagaggaccgaattggagatttcgtatgccccgcgcctcgaccaagaaaaagaagaattactacgcaagaaattacagttaaatcccacacctgctaacagaagcagataccagtccaggaaggtggagaacatgaaagccataacagctagacgtattctgcaaggcctagggcattatttgaaggcagaaggaaaagtggagtgctaccgaaccctgcatcctgttcctttgtattcatctagtgtgaaccgtgccttttcaagccccaaggtcgcagtggaagcctgtaacgccatgttgaaagagaactttccgactgtggcttcttactgtattattccagagtacgatgcctatttggacatggttgacggagcttcatgctgcttagacactgccagtttttgccctgcaaagctgcgcagctttccaaagaaacactcctatttggaacccacaatacgatcggcagtgccttcagcgatccagaacacgctccagaacgtcctggcagctgccacaaaaagaaattgcaatgtcacgcaaatgagagaattgcccgtattggattcggcggcctttaatgtggaatgcttcaagaaatatgcgtgtaataatgaatattgggaaacgtttaaagaaaaccccatcaggcttactgaagaaaacgtggtaaattacattaccaaattaaaaggaccaaaagctgctgctctttttgcgaagacacataatttgaatatgttgcaggacataccaatggacaggtttgtaatggacttaaagagagacgtgaaagtgactccaggaacaaaacatactgaagaacggcccaaggtacaggtgatccaggctgccgatccgctagcaacagcgtatctgtgcggaatccaccgagagctggttaggagattaaatgcggtcctgcttccgaacattcatacactgtttgatatgtcggctgaagactttgacgctattatagccgagcacttccagcctggggattgtgttctggaaactgacatcgcgtcgtttgataaaagtgaggacgacgccatggctctgaccgcgttaatgattctggaagacttaggtgtggacgcagagctgttgacgctgattgaggcggctttcggcgaaatttcatcaatacatttgcccactaaaactaaatttaaattcggagccatgatgaaatctggaatgttcctcacactgtttgtgaacacagtcattaacattgtaatcgcaagcagagtgttgagagaacggctaaccggatcaccatgtgcagcattcattggagatgacaatatcgtgaaaggagtcaaatcggacaaattaatggcagacaggtgcgccacctggttgaatatggaagtcaagattatagatgctgtggtgggcgagaaagcgccttatttctgtggagggtttattttgtgtgactccgtgaccggcacagcgtgccgtgtggcagaccccctaaaaaggctgtttaagcttggcaaacctctggcagcagacgatgaacatgatgatgacaggagaagggcattgcatgaagagtcaacacgctggaaccgagtgggtattctttcagagctgtgcaaggcagtagaatcaaggtatgaaaccgtaggaacttccatcatagttatggccatgactactctagctagcagtgttaaatcattcagctacctgagaggggcccctataactctctacggctaacctgaatggactacgacatagtctagtccgccaagatgtttgtttttcttgttcttctgccattggtgtcttcccaatgtgtgaacttgactacccgcacacagctcccgccggcgtacactaactccttcacccggggggtttactacccggacaaagtgttccgcagcagtgtcctgcattcaacacaagatttgttccttccattctttagcaatgtcacttggttccatgctatacacgtgagtggcactaacggcactaagcgcttcgataacccggttctgccgtttaatgatggcgtttacttcgcaagtactgagaaatcaaacattatacgggggtggatattcggtactacattggatagtaaaactcaaagccttttgattgtcaacaatgcaactaatgtagtcataaaagtttgtgaattccaattctgtaacgatccctttcttggtgtgtattaccacaagaataacaaatcatggatggagtctgaatttcgagtatacagtagcgccaataattgcacgtttgagtatgtaagccagccgtttctgatggacttggaaggaaagcaaggcaactttaagaacctcagggagttcgtattcaaaaatatagacggttacttcaagatttactcaaaacatacacctatcaacttggtccgagatctcccacaaggtttttcagcgctcgagccattggtggacctgcccatcggaatcaacattacccgattccagacactgcttgcactgcaccggagttatctcacacccggcgacagctcgtctggttggacggcgggagctgccgcttactatgtcggttacttgcaacctcggacatttcttctgaagtataacgaaaacggtacgatcaccgatgccgtagactgcgctctcgatcccctttcagagacgaagtgcacgctcaaatcatttactgtggaaaaaggaatttatcaaacgagcaatttcagggtgcaacccacggagtccatcgtacgattcccaaacataacaaatctttgcccgtttggcgaggtttttaatgctacgcgctttgcatcagtgtacgcttggaataggaaacgaatctcaaattgtgttgcggattattccgtgttgtataattccgcaagcttctccacctttaaatgttatggcgtgtcccccacaaaacttaacgatctttgctttacaaatgtctatgcggattcattcgttatccgaggggatgaagtgcgacaaatcgctcctgggcagacagggaagatagctgattacaattacaaacttccagacgattttacaggatgtgtaatcgcgtggaactcaaacaatttggacagtaaggttggtggcaactacaattatctgtatagacttttcagaaaaagtaacctcaaacctttcgaacgcgacattagcactgagatataccaggccggatcaactccttgtaacggtgttgaaggtttcaactgttactttccgctccaatcctacggctttcaaccaacgaacggtgtcgggtaccaaccatacagagttgtcgtcttgagttttgagcttttgcacgcacctgcaaccgtgtgtggtccgaagaaaagtactaatctggttaaaaataaatgcgtcaatttcaactttaatgggttgacgggcacaggcgtgctgacagagtccaataaaaagtttttgccctttcagcagtttgggagggacatcgccgatacgaccgatgccgtccgagatcctcaaacccttgaaatattggacattaccccctgtagttttggcggtgtaagtgtgattactcccggaacgaatacatctaaccaggtagcggtgctttatcaagatgtcaactgtacagaggtccccgtggcgattcacgccgatcagttgacacccacatggagggtttacagcacaggatccaacgtcttccagacgagagcaggatgcttgatcggtgccgagcatgtgaataacagctacgaatgtgacattccgattggtgctggaatctgcgcaagttaccaaactcaaacgaattcccctggctccgcctcctctgtggcatcccagtctataatcgcgtatacgatgtcactgggcgccgagaattctgtcgcatatagcaacaactccatcgcaatacccacaaattttacaatttctgtgaccacggaaattctgcccgtcagcatgacaaaaactagcgtggactgcacgatgtatatctgcggcgactccacagagtgttccaacctcctcttgcaatatggcagcttttgcacacaattgaaccgagcgctcaccgggatagcggtcgagcaagataagaatacccaagaggtgtttgcccaggtgaagcaaatctataagacccctccaataaaggattttggcggcttcaatttctcacaaattttgcccgatccatctaagccgtccaagcgatcatttattgaggatctgctgttcaacaaagtcactctcgccgacgcggggtttattaaacaatatggcgattgcctgggcgacatcgccgccagggaccttatatgcgcccagaagttcaacggtctcaccgtgctgccaccattgttgactgacgaaatgatcgcacagtatacgtcagcgctgctggctggtaccattacttctggctggacattcggagccggtgcagcccttcagattccatttgcaatgcagatggcctatagatttaatggaataggagtgacgcagaacgtattgtacgagaatcaaaagttgatcgcaaaccagttcaattctgccattggaaagatacaagattccctttcttctaccgcctcagccctgggtaagttgcaagatgtcgtcaaccaaaatgcacaggctttgaataccttggtaaaacaattgtcatccaatttcggcgccataagctcagtacttaacgatatcttgtcacgattggatccccccgaagccgaggtccaaatcgataggctcatcacgggacggctccagagccttcaaacctatgtgacgcaacaactgatacgggccgcagaaatccgagcgtccgccaacttggcagctaccaagatgtccgaatgtgtactgggtcaatcaaagagagttgatttctgtggaaaaggataccatctcatgtcattcccccaaagcgccccgcacggcgtcgtgttcctccatgtgacttacgttccagcacaagaaaaaaacttcacaactgcgcccgctatctgccatgacgggaaggcgcacttcccacgagagggtgtatttgtgtcaaatggaacgcactggttcgtaacgcaaaggaacttctatgaaccgcagataatcacgactgacaacacttttgtatctggcaattgtgatgtggtcatcgggatagttaacaacactgtctatgacccgctgcaacccgagcttgattcatttaaagaagaactcgataaatatttcaagaatcacaccagtcccgatgtggaccttggagacatttccgggataaatgcctctgtggtaaacatccaaaaggaaatcgatcggctgaatgaagtggccaaaaacttgaacgaaagtctgatagaccttcaggagctcgggaagtatgaacaagggagcggttatattcctgaagctccaagagatgggcaagcttacgttcgtaaagatggcgaatgggtacttctttctacctttttatgatgatctagacggcgcgcccacccagcggccgcatacagcagcaattggcaagctgcttacatagaactcgcggcgattggcatgccgccttaaaatttttattttatttttcttttcttttccgaatcggattttgtttttaatatttcaaaaaaaaaaaaaaaaaaaaaaaaaaaaaaaaaaaaaaaa

SEQ ID NO: 180 - protein, 1273 aa, Severe acute respiratory syndrome coronavirus 2; identical to SEQ ID NO: 1

SEQ ID NO: 181 - DNA, 21 bp, Artificial Sequence
  Description of Artificial Sequence: Synthetic oligonucleotide
  oJW57
aggatctgctgttcaacaaag

SEQ ID NO: 182 - DNA, 18 bp, Artificial Sequence
  Description of Artificial Sequence: Synthetic oligonucleotide
  oJW58
caataaatgatcgcttgg

SEQ ID NO: 183 - DNA, 21 bp, Artificial Sequence
  Description of Artificial Sequence: Synthetic oligonucleotide
  oJW55
gcgacagctcgtctggttgga

SEQ ID NO: 184 - DNA, 18 bp, Artificial Sequence
  Description of Artificial Sequence: Synthetic oligonucleotide
  oJW56
cgggtgtgagataactcc

SEQ ID NO: 185 - DNA, 21 bp, Artificial Sequence
  Description of Artificial Sequence: Synthetic oligonucleotide
  oJW49
ggtaacttgcgcagattccag

SEQ ID NO: 186 - DNA, 21 bp, Artificial Sequence
  Description of Artificial Sequence: Synthetic oligonucleotide
  oJW50
ccgaggtccaaatcgataggc

SEQ ID NO: 187 - DNA, 560 bp, Artificial Sequence
  Description of Artificial Sequence: Synthetic polynucleotide
  oJW51
gctggaatctgcgcaagttaccaaactcaaacgaattcccctggctccgcctcctctgtggcatcccagtctataatcgcgtatacgatgtcactgggcgccgagaattctgtcgcatatagcaacaactccatcgcaatacccacaaattttacaatttctgtgaccacggaaattctgcccgtcagcatgacaaaaactagcgtggactgcacgatgtatatctgcggcgactccacagagtgttccaacctcctcttgcaatatggcagcttttgcacacaattgaaccgagcgctcaccgggatagcggtcgagcaagataagaatacccaagaggtgtttgcccaggtgaagcaaatctataagacccctccaataaaggattttggcggcttcaatttctcacaaattttgcccgatccatctaagccgtccaagcgatcatttattgaggatctgctgttcaacaaagtcactctcgccgacgcggggtttattaaacaatatggcgattgcctgggcgacatcgccgccagggaccttatatgcgcccagaa

SEQ ID NO: 188 - protein, 4 aa, Severe acute respiratory syndrome coronavirus 2
RRAR

SEQ ID NO: 189 - DNA, 12 bp, Severe acute respiratory syndrome coronavirus 2
aggcgagccagg

SEQ ID NO: 190 - protein, 4 aa, Artificial Sequence
  Description of Artificial Sequence: Synthetic peptide
GSAS

SEQ ID NO: 191 - DNA, 12 bp, Artificial Sequence
  Description of Artificial Sequence: Synthetic oligonucleotide
ggctccgcctcc

SEQ ID NO: 192 - DNA, 453 bp, Artificial Sequence
  Description of Artificial Sequence: Synthetic polynucleotide
  oJW52
gccgccagggaccttatatgcgcccagaagttcaacggtctcaccgtgctgccaccattgttgactgacgaaatgatcgcacagtatacgtcagcgctgctggctggtaccattacttctggctggacattcggagccggtgcagcccttcagattccatttgcaatgcagatggcctatagatttaatggaataggagtgacgcagaacgtattgtacgagaatcaaaagttgatcgcaaaccagttcaattctgccattggaaagatacaagattccctttcttctaccgcctcagccctgggtaagttgcaagatgtcgtcaaccaaaatgcacaggctttgaataccttggtaaaacaattgtcatccaatttcggcgccataagctcagtacttaacgatatcttgtcacgattggatccccccgaagccgaggtccaaatcgatagg

SEQ ID NO: 193 - protein, 8 aa, Severe acute respiratory syndrome coronavirus 2
  oJW52 portion Amino acid
RLDKVEAE

SEQ ID NO: 194 - DNA, 24 bp, Severe acute respiratory syndrome coronavirus 2
  oJW52 portion Nucleic acid
cgattggataaggtcgaagccgag

SEQ ID NO: 195 - protein, 8 aa, Artificial Sequence
  Description of Artificial Sequence: Synthetic peptide
  oJW52 mutation Amino acid
RLDPPEAE

SEQ ID NO: 196 - DNA, 24 bp, Artificial Sequence
  Description of Artificial Sequence: Synthetic oligonucleotide
  oJW52 mutation Nucleic acid
cgattggatccccccgaagccgag

SEQ ID NO: 197 - DNA, 51 bp, Artificial Sequence
  Description of Artificial Sequence: Synthetic oligonucleotide
  oJW59
gacatagtctagtccgccaagatgtttgtttttcttgttcttctgccattg

SEQ ID NO: 198 - DNA, 21 bp, Artificial Sequence
  Description of Artificial Sequence: Synthetic oligonucleotide
  oJW53
ccgagctcctgaaggtctatc

SEQ ID NO: 199 - DNA, 53 bp, Artificial Sequence
  Description of Artificial Sequence: Synthetic oligonucleotide
  oJW41
gccgctgggtgggcgcgccgtctagattatcactaagtgtagtgcaacttgac

SEQ ID NO: 200 - DNA, 184 bp, Artificial Sequence
  Description of Artificial Sequence: Synthetic polynucleotide
  oJW54
gatagaccttcaggagctcgggaagtatgaacaagggagcggttatattcctgaagctccaagagatgggcaagcttacgttcgtaaagatggcgaatgggtacttctttctacctttttatgatgatctagacggcgcgcccacccagcggccgcatacagcagcaattggcaagctgcttac

SEQ ID NO: 201 - DNA, 24 bp, Artificial Sequence
  Description of Artificial Sequence: Synthetic oligonucleotide
  oJL112
ccatcatagttatggccatgacta

SEQ ID NO: 202 - DNA, 21 bp, Artificial Sequence
  Description of Artificial Sequence: Synthetic oligonucleotide
  oMS142
agaaaaataaacaaatagggg

SEQ ID NO: 203 - DNA, 20 bp, Artificial Sequence
  Description of Artificial Sequence: Synthetic oligonucleotide
  oMS143
ccaaaatggagaaagttcac

SEQ ID NO: 204 - DNA, 20 bp, Artificial Sequence
  Description of Artificial Sequence: Synthetic oligonucleotide
  oMS144
tatgtgcctccacgacgacg

SEQ ID NO: 205 - DNA, 21 bp, Artificial Sequence
  Description of Artificial Sequence: Synthetic oligonucleotide
  oMS145
acgtggcaagcaaaattacac

SEQ ID NO: 206 - DNA, 21 bp, Artificial Sequence
  Description of Artificial Sequence: Synthetic oligonucleotide
  oMS146
gaagatcaagaagatgaaagg

SEQ ID NO: 207 - DNA, 20 bp, Artificial Sequence
  Description of Artificial Sequence: Synthetic oligonucleotide
  oMS147
acctcgtggcttgataaagg

SEQ ID NO: 208 - DNA, 21 bp, Artificial Sequence
  Description of Artificial Sequence: Synthetic oligonucleotide
  oMS148
aacagtgcgtcaagaaagaac

SEQ ID NO: 209 - DNA, 20 bp, Artificial Sequence
  Description of Artificial Sequence: Synthetic oligonucleotide
  oMS149
aaaaaggcagtgctctgcgg

SEQ ID NO: 210 - DNA, 20 bp, Artificial Sequence
  Description of Artificial Sequence: Synthetic oligonucleotide
  oMS150
agaacatgtgaacgtcctac

SEQ ID NO: 211 - DNA, 21 bp, Artificial Sequence
  Description of Artificial Sequence: Synthetic oligonucleotide
  oMS151
atccattaggaataatcactg

SEQ ID NO: 212 - DNA, 21 bp, Artificial Sequence
  Description of Artificial Sequence: Synthetic oligonucleotide
  oMS152
tatttgttaatgtgaggaccc

SEQ ID NO: 213 - DNA, 22 bp, Artificial Sequence
  Description of Artificial Sequence: Synthetic oligonucleotide
  oMS153
agtgattataaatgctgctaac

SEQ ID NO: 214 - DNA, 20 bp, Artificial Sequence
  Description of Artificial Sequence: Synthetic oligonucleotide
  oMS154
ctcaaggaagcagtggctag

SEQ ID NO: 215 - DNA, 21 bp, Artificial Sequence
  Description of Artificial Sequence: Synthetic oligonucleotide
  oMS155
tccagaacaaattactgtgtg

SEQ ID NO: 216 - DNA, 20 bp, Artificial Sequence
  Description of Artificial Sequence: Synthetic oligonucleotide
  oMS156
ttgatgtggacagtttatcc

SEQ ID NO: 217 - DNA, 20 bp, Artificial Sequence
  Description of Artificial Sequence: Synthetic oligonucleotide
  oMS157
ttgatgcgggtgcatacatc

SEQ ID NO: 218 - DNA, 21 bp, Artificial Sequence
  Description of Artificial Sequence: Synthetic oligonucleotide
  oMS158
aaagagaactttccgactgtg

SEQ ID NO: 219 - DNA, 20 bp, Artificial Sequence
  Description of Artificial Sequence: Synthetic oligonucleotide
  oMS159
aagctgctgctctttttgcg

SEQ ID NO: 220 - DNA, 19 bp, Artificial Sequence
  Description of Artificial Sequence: Synthetic oligonucleotide
  oMS160
cggctttcggcgaaatttc

SEQ ID NO: 221 - DNA, 21 bp, Artificial Sequence
  Description of Artificial Sequence: Synthetic oligonucleotide
  oMS161
cgatgaacatgatgatgacag

SEQ ID NO: 222 - DNA, 3822 bp, Artificial Sequence
  Description of Artificial Sequence: Synthetic polynucleotide
atgtttgtttttcttgttcttctgccattggtgtcttcccaatgtgtgaacttgactacccgcacacagctcccgccggcgtacactaactccttcacccggggggtttactacccggacaaagtgttccgcagcagtgtcctgcattcaacacaagatttgttccttccattctttagcaatgtcacttggttccatgctatacacgtgagtggcactaacggcactaagcgcttcgataacccggttctgccgtttaatgatggcgtttacttcgcaagtactgagaaatcaaacattatacgggggtggatattcggtactacattggatagtaaaactcaaagccttttgattgtcaacaatgcaactaatgtagtcataaaagtttgtgaattccaattctgtaacgatccctttcttggtgtgtattaccacaagaataacaaatcatggatggagtctgaatttcgagtatacagtagcgccaataattgcacgtttgagtatgtaagccagccgtttctgatggacttggaaggaaagcaaggcaactttaagaacctcagggagttcgtattcaaaaatatagacggttacttcaagatttactcaaaacatacacctatcaacttggtccgagatctcccacaaggtttttcagcgctcgagccattggtggacctgcccatcggaatcaacattacccgattccagacactgcttgcactgcaccggagttatctcacacccggcgacagctcgtctggttggacggcgggagctgccgcttactatgtcggttacttgcaacctcggacatttcttctgaagtataacgaaaacggtacgatcaccgatgccgtagactgcgctctcgatcccctttcagagacgaagtgcacgctcaaatcatttactgtggaaaaaggaatttatcaaacgagcaatttcagggtgcaacccacggagtccatcgtacgattcccaaacataacaaatctttgcccgtttggcgaggtttttaatgctacgcgctttgcatcagtgtacgcttggaataggaaacgaatctcaaattgtgttgcggattattccgtgttgtataattccgcaagcttctccacctttaaatgttatggcgtgtcccccacaaaacttaacgatctttgctttacaaatgtctatgcggattcattcgttatccgaggggatgaagtgcgacaaatcgctcctgggcagacagggaagatagctgattacaattacaaacttccagacgattttacaggatgtgtaatcgcgtggaactcaaacaatttggacagtaaggttggtggcaactacaattatctgtatagacttttcagaaaaagtaacctcaaacctttcgaacgcgacattagcactgagatataccaggccggatcaactccttgtaacggtgttgaaggtttcaactgttactttccgctccaatcctacggctttcaaccaacgaacggtgtcgggtaccaaccatacagagttgtcgtcttgagttttgagcttttgcacgcacctgcaaccgtgtgtggtccgaagaaaagtactaatctggttaaaaataaatgcgtcaatttcaactttaatgggttgacgggcacaggcgtgctgacagagtccaataaaaagtttttgccctttcagcagtttgggagggacatcgccgatacgaccgatgccgtccgagatcctcaaacccttgaaatattggacattaccccctgtagttttggcggtgtaagtgtgattactcccggaacgaatacatctaaccaggtagcggtgctttatcaagatgtcaactgtacagaggtccccgtggcgattcacgccgatcagttgacacccacatggagggtttacagcacaggatccaacgtcttccagacgagagcaggatgcttgatcggtgccgagcatgtgaataacagctacgaatgtgacattccgattggtgctggaatctgcgcaagttaccaaactcaaacgaattcccctggctccgcctcctctgtggcatcccagtctataatcgcgtatacgatgtcactgggcgccgagaattctgtcgcatatagcaacaactccatcgcaatacccacaaattttacaatttctgtgaccacggaaattctgcccgtcagcatgacaaaaactagcgtggactgcacgatgtatatctgcggcgactccacagagtgttccaacctcctcttgcaatatggcagcttttgcacacaattgaaccgagcgctcaccgggatagcggtcgagcaagataagaatacccaagaggtgtttgcccaggtgaagcaaatctataagacccctccaataaaggattttggcggcttcaatttctcacaaattttgcccgatccatctaagccgtccaagcgatcatttattgaggatctgctgttcaacaaagtcactctcgccgacgcggggtttattaaacaatatggcgattgcctgggcgacatcgccgccagggaccttatatgcgcccagaagttcaacggtctcaccgtgctgccaccattgttgactgacgaaatgatcgcacagtatacgtcagcgctgctggctggtaccattacttctggctggacattcggagccggtgcagcccttcagattccatttgcaatgcagatggcctatagatttaatggaataggagtgacgcagaacgtattgtacgagaatcaaaagttgatcgcaaaccagttcaattctgccattggaaagatacaagattccctttcttctaccgcctcagccctgggtaagttgcaagatgtcgtcaaccaaaatgcacaggctttgaataccttggtaaaacaattgtcatccaatttcggcgccataagctcagtacttaacgatatcttgtcacgattggatccccccgaagccgaggtccaaatcgataggctcatcacgggacggctccagagccttcaaacctatgtgacgcaacaactgatacgggccgcagaaatccgagcgtccgccaacttggcagctaccaagatgtccgaatgtgtactgggtcaatcaaagagagttgatttctgtggaaaaggataccatctcatgtcattcccccaaagcgccccgcacggcgtcgtgttcctccatgtgacttacgttccagcacaagaaaaaaacttcacaactgcgcccgctatctgccatgacgggaaggcgcacttcccacgagagggtgtatttgtgtcaaatggaacgcactggttcgtaacgcaaaggaacttctatgaaccgcagataatcacgactgacaacacttttgtatctggcaattgtgatgtggtcatcgggatagttaacaacactgtctatgacccgctgcaacccgagcttgattcatttaaagaagaactcgataaatatttcaagaatcacaccagtcccgatgtggaccttggagacatttccgggataaatgcctctgtggtaaacatccaaaaggaaatcgatcggctgaatgaagtggccaaaaacttgaacgaaagtctgatagaccttcaggagctcgggaagtatgaacaatacataaagtggccatggtacatctggcttgggttcatcgctggcctcatagccatcgttatggttaccatcatgctctgctgtatgacttcctgttgttcctgtctcaaagggtgttgcagctgtggtagctgctgcaaatttgacgaggatgactcagaacccgtcttgaagggagtcaagttgcactacacttag

SEQ ID NO: 223 - protein, 1273 aa, Artificial Sequence; identical to SEQ ID NO: 49
  Description of Artificial Sequence: Synthetic polypeptide

SEQ ID NO: 224 - DNA, 11575 bp, Artificial Sequence; identical to SEQ ID NO: 177
  Description of Artificial Sequence: Synthetic polynucleotide

SEQ ID NO: 225 - DNA, 24 bp, Artificial Sequence
  Description of Artificial Sequence: Synthetic oligonucleotide
  oJL471
cgtttctgatggacttggaaggaa

SEQ ID NO: 226 - DNA, 27 bp, Artificial Sequence
  Description of Artificial Sequence: Synthetic oligonucleotide
  oJL472
gctgattacaattacaaacttccagac

SEQ ID NO: 227 - DNA, 23 bp, Artificial Sequence
  Description of Artificial Sequence: Synthetic oligonucleotide
  oJL473
cgagcatgtgaataacagctacg

SEQ ID NO: 228 - DNA, 25 bp, Artificial Sequence
  Description of Artificial Sequence: Synthetic oligonucleotide
  oJL474
ccttcagattccatttgcaatgcag

SEQ ID NO: 229 - DNA, 22 bp, Artificial Sequence
  Description of Artificial Sequence: Synthetic oligonucleotide
  oJL475
gcaattgtgatgtggtcatcgg

SEQ ID NO: 230 - DNA, 23 bp, Artificial Sequence
  Description of Artificial Sequence: Synthetic oligonucleotide
  oJL23
ggaggtctatataagcagagctc

SEQ ID NO: 231 - protein, 8 aa, Artificial Sequence
  Description of Artificial Sequence: Synthetic 8xHis tag
HHHHHHHH

SEQ ID NO: 232 - protein, 21 aa, Severe acute respiratory syndrome coronavirus 2
MFVFLVLLPLVSSQCVNLTTR

SEQ ID NO: 233 - protein, 23 aa, Artificial Sequence
  Description of Artificial Sequence: Synthetic peptide
MGVKVLFALICIAVAEAKNLTTR

SEQ ID NO: 234 - protein, 21 aa, Artificial Sequence
  Description of Artificial Sequence: Synthetic peptide
MGVKVLFALICIAVAEAKTTR

SEQ ID NO: 235 - protein, 29 aa, Artificial Sequence
  Description of Artificial Sequence: Synthetic peptide
MPMGSLQPLATLYLLGMLVASVLANLTTR

SEQ ID NO: 236 - protein, 27 aa, Artificial Sequence
  Description of Artificial Sequence: Synthetic peptide
MPMGSLQPLATLYLLGMLVASVLATTR

SEQ ID NO: 237 - protein, 21 aa, Artificial Sequence
  Description of Artificial Sequence: Synthetic peptide
MPLLLLLPLLWAGAAANLTTR

SEQ ID NO: 238 - protein, 19 aa, Artificial Sequence
  Description of Artificial Sequence: Synthetic peptide
MPLLLLLPLLWAGAAATTR

SEQ ID NO: 239 - protein, 25 aa, Artificial Sequence
  Description of Artificial Sequence: Synthetic peptide
MYRMQLLSCIALSLALVTNSNLTTR

SEQ ID NO: 240 - protein, 23 aa, Artificial Sequence
  Description of Artificial Sequence: Synthetic peptide
MYRMQLLSCIALSLALVTNSTTR

SEQ ID NO: 241 - protein, 23 aa, Artificial Sequence
  Description of Artificial Sequence: Synthetic peptide
MDWTWILFLVAAATRVHSNLTTR

SEQ ID NO: 242 - protein, 21 aa, Artificial Sequence
  Description of Artificial Sequence: Synthetic peptide
MDWTWILFLVAAATRVHSTTR

SEQ ID NO: 243 - protein, 25 aa, Artificial Sequence
  Description of Artificial Sequence: Synthetic peptide
METPAELLFLLLLWLPDTTGNLTTR

SEQ ID NO: 244 - protein, 23 aa, Artificial Sequence
  Description of Artificial Sequence: Synthetic peptide
METPAELLFLLLLWLPDTTGTTR

SEQ ID NO: 245 - protein, 26 aa, Artificial Sequence
  Description of Artificial Sequence: Synthetic peptide
MNEGSIMWLASLAVVIACAGANLTTR

SEQ ID NO: 246 - protein, 24 aa, Artificial Sequence
  Description of Artificial Sequence: Synthetic peptide
MNEGSIMWLASLAVVIACAGATTR

SEQ ID NO: 247 - protein, 35 aa, Artificial Sequence
  Description of Artificial Sequence: Synthetic peptide
MGRKQNKRGGNEGSIMWLASLAVVIACAGANLTTR

SEQ ID NO: 248 - protein, 33 aa, Artificial Sequence
  Description of Artificial Sequence: Synthetic peptide
MGRKQNKRGGNEGSIMWLASLAVVIACAGATTR

SEQ ID NO: 249 - protein, 26 aa, Artificial Sequence
  Description of Artificial Sequence: Synthetic peptide
METDTLLLWVLLLWVPGSTGDNLTTR

SEQ ID NO: 250 - protein, 24 aa, Artificial Sequence
  Description of Artificial Sequence: Synthetic peptide
METDTLLLWVLLLWVPGSTGDTTR

SEQ ID NO: 251 - protein, 26 aa, Artificial Sequence
  Description of Artificial Sequence: Synthetic peptide
MRPTLLWSLLLLLGVFAAAAANLTTR

SEQ ID NO: 252 - protein, 24 aa, Artificial Sequence
  Description of Artificial Sequence: Synthetic peptide
MRPTLLWSLLLLLGVFAAAAATTR

SEQ ID NO: 253 - protein, 24 aa, Artificial Sequence
  Description of Artificial Sequence: Synthetic peptide
MGVKVLFALICIAVAEAKPNLTTR

SEQ ID NO: 254 - protein, 22 aa, Artificial Sequence
  Description of Artificial Sequence: Synthetic peptide
MGVKVLFALICIAVAEAKPTTR

SEQ ID NO: 255 - protein, 21 aa, Severe acute respiratory syndrome coronavirus 2
CCKFDEDDSEPVLKGVKLHYT

SEQ ID NO: 256 - protein, 21 aa, Artificial Sequence
  Description of Artificial Sequence: Synthetic peptide
CCKFDEDDSEPVLKGVALAYT

SEQ ID NO: 257 - protein, 8 aa, Artificial Sequence
  Description of Artificial Sequence: Synthetic peptide
CCKFDEDD

SEQ ID NO: 258 - RNA, 54 nt, Gaussia princeps
  Gaussian Luciferase signal sequence
auggguguuaaagugcuuuucgcucuuaucuguauagcugucgcugaggcaaag

SEQ ID NO: 259 - RNA, 72 nt, Homo sapiens
  human CD5 signal sequence
augccuaugggcucucugcaaccccuugcaacccuuuauuuguuggggaugcuugucgcguccguccucgcg

SEQ ID NO: 260 - RNA, 48 nt, Homo sapiens
  human CD33 signal sequence
augccccucuugcuucucuugccacugcugugggcuggggcggcagcu

SEQ ID NO: 261 - RNA, 60 nt, Homo sapiens
  human IL2 signal sequence
auguaccgaaugcagcucuuguccugcauugcucucagccuugcacuugugaccaauucc

SEQ ID NO: 262 - RNA, 54 nt, Homo sapiens
  human IgE signal sequence
auggauuggacguggauacuguuccuuguggcugcagccacucgcguucacuca

SEQ ID NO: 263 - RNA, 60 nt, Homo sapiens
  human Light Chain Kappa signal sequence
auggaaacuccugcggaguugcuguuccuucugcuucuuuggcucccugauacaacggga

SEQ ID NO: 264 - RNA, 63 nt, Japanese encephalitis virus
  JEV short signal sequence
augaacgagggguccaucauguggcucgcguccuuggccguugugauugcaugugccggagcu

SEQ ID NO: 265 - RNA, 90 nt, Japanese encephalitis virus
  JEV long signal sequence
augggcaggaaacaaaacaaaaggggagguaaugaggguuccaucaugugguuggcuucccucgccgugguuauugcgugcgcuggugcu

SEQ ID NO: 266 - RNA, 63 nt, Mus musculus
  Mouse Light Chain Kappa signal sequence
auggaaacugauacacuguugcuuuggguacuccuccucuggguccccggaaguacaggcgau

SEQ ID NO: 267 - RNA, 63 nt, Artificial Sequence
  Description of Artificial Sequence: Synthetic oligonucleotide
  SSP signal sequence
augaggccgacucugcuuuggagucuguuguugcuuuuggguguauuugcugcggcagcagcc

SEQ ID NO: 268 - RNA, 57 nt, Gaussia princeps
  Gaussian Luciferase (AKP) signal sequence
auggguguuaaaguguuguuugcuuugauuugcauugcagucgcugaagcaaaaccg

We claim:

1. A self-replicating ribonucleic acid (RNA) comprising a first sequence or a second sequence, the first sequence: 1) being at least 95% identical to SEQ ID NO: 122 and the same length as, or up to 30 nucleotides shorter than, SEQ ID NO: 122 and 2) encoding a first amino acid sequence being at least 99% identical to SEQ ID NO:26 and the same length as, or up to 10 amino acids shorter than, SEQ ID NO:26, the second sequence: 3) being at least 95% identical to SEQ ID NO: 145 and the same length as, or up to 30 nucleotides shorter than, SEQ ID NO:145 and 4) encoding a second amino acid sequence being at least 99% identical to SEQ ID NO:49 and the same length as, or up to 10 amino acids shorter than, SEQ ID NO:49.

2. The self-replicating RNA of claim 1, wherein the first sequence or the second sequence further comprises a third sequence, the third sequence encoding a heterologous signal sequence, wherein the heterologous signal sequence comprises a positive charge at its N terminus.

3. The self-replicating RNA of claim 2, wherein the heterologous signal sequence has a sequence selected from:
a) a Gaussian Luciferase signal sequence as shown in SEQ ID NO:2,
b) a human CD5 signal sequence as shown in SEQ ID NO:3,
c) a human CD33 signal sequence as shown in SEQ ID NO:4,
d) a human IL2 signal sequence as shown in SEQ ID NO:5,
e) a human IgE signal sequence as shown in SEQ ID NO:6,
f) a human Light Chain Kappa signal sequence as shown in SEQ ID NO:7,
g) a JEV short signal sequence as shown in SEQ ID NO:8,
h) a JEV long signal sequence as shown in SEQ ID NO:9,
i) a Mouse Light Chain Kappa signal sequence as shown in SEQ ID NO:10,
j) a SSP signal sequence as shown in SEQ ID NO:11,
k) a Gaussian Luciferase (AKP) signal sequence as shown in SEQ ID NO:12, and
1) a variant of any one of sequences a)-k) having 1, 2, 3, 4, or 5 amino acid residue deletions, insertions, or substitutions.

4. The self-replicating RNA of claim 2, wherein the heterologous signal sequence has a sequence selected from:
a) a Gaussian Luciferase signal sequence as shown in SEQ ID NO:2,
b) a human Light Chain Kappa signal sequence as shown in SEQ ID NO:7,
c) a Gaussian Luciferase (AKP) signal sequence as shown in SEQ ID NO:12, and
d) a variant of any one of sequences a)-c) having 1, 2, 3, 4, or 5 amino acid residue deletions, insertions, or substitutions.

5. (canceled)

6. (canceled)

7. The self-replicating RNA of claim 1 comprising from 5′ to 3′ a viral equine encephalitis (VEE) TC-83 replicon a subgenomic promoter, and the first sequence or the second sequence, the VEE TC-83 replicon comprising VEE nonstructural proteins 1-4 (nsP1-4).

8. The self-replicating RNA of claim 7, comprising SEQ ID NO:171,wherein the first sequence or the second sequence is inserted between positions 7561 and 7562 of SEQ ID NO:171.

9. A self-replicating RNA comprising from 5′ to 3′ a sequence comprising: 1) SEQ ID NO:172, 2) a construct encoding: (i) a signal sequence selected from the group consisting of SEQ ID NOS:258-268 and (ii) a first amino acid sequence being at least 99% identical to SEQ ID NO:26 and the same length as, or up to 10 amino acids shorter than, SEQ ID NO:26 or a second amino acid sequence being at least 99% identical to SEQ ID NO:49 and the same length as, or up to 10 amino acids shorter than, SEQ ID NO:49,and 3) a sequence having SEQ ID NO:173.

10. The self-replicating RNA of claim 9, wherein the signal sequence has a sequence selected from the group consisting of SEQ ID NO:258, SEQ ID NO:263, and SEQ ID NO:268.

11. A DNA encoding a self-replicating RNA molecule comprising a first sequence or a second sequence, the first sequence: 1) being at least 95% identical to SEQ ID NO: 122 and the same length as, or up to 30 nucleotides shorter than, SEQ ID NO:122 and 2) encoding a first amino acid sequence being at least 99% identical to SEQ ID NO:26 and the same length as, or up to 10 amino acids shorter than, SEQ ID NO:26, the second sequence: 3) being at least 95% identical to SEQ ID NO:145 and the same length as, or up to 30 nucleotides shorter than, SEQ ID NO:145 and 4) encoding a first amino acid sequence being at least 99% identical to SEQ ID NO:49 and the same length as, or up to 10 amino acids shorter than, SEQ ID NO:49.

12. A composition comprising an immunologically effective amount of the self-replicating RNA of claim 1 and a pharmaceutically acceptable carrier.

13. The composition of claim 12, wherein the pharmaceutically acceptable carrier comprises a biodegradable polymeric microparticle delivery system.

14. The composition of claim 12, wherein the pharmaceutically acceptable carrier comprises a submicron cationic oil-in-water emulsion.

15. The composition claim 12, wherein the pharmaceutically acceptable carrier comprises a liposome.

16. The composition of claim 12 further comprising a nucleic acid sequence that encodes an antigen that differs from the first amino acid sequence or the second amino acid sequence.

17. A method for producing the self-replicating RNA molecule, the method comprising transcribing the DNA of claim 11 to obtain the self-replicating RNA molecule comprising comprising .

18. A method of inducing an immune response against the first amino acid sequence or second amino acid sequence in a subject in need thereof, the method comprising administering to the subject an immunologically effective amount of the self-replicating RNA molecule of claim 1 .

19. (canceled)

20. (canceled)

21. A composition comprising an immunologically effective amount of the DNA of claim 11.

22. A method of inducing an immune response against the first amino acid sequence or second amino acid sequence in a subject in need thereof, the method comprising administering to the subject an immunologically effective amount of the self-replicating RNA molecule of claim 15.
